United States Patent Application Publication US 2026/0058010 A1 - sequence listing, part 27

SEQ ID NO: 335 - DNA, 742909 bp, Homo sapiens
  source 1..742909: mol_type = genomic DNA
atctctaccaaatttgtttttaaattagttgggcgtggtggctcacaccagtagtcccaccaactacttgaggctgaggtgggaggatcacttaagcctgggaggtcaaggctgcagtgagccaagatcgtgccactgcactccagcctgggcaacagagaccatgtctccaaaaaaaaaaagagtgggggagagagggcggagggggaaccattcttggccatgcatgcacagtggctcatgtctataatcccaacactttgggaggctgaggtgggaagactgcttgaggccaaaagttcaagaccagcctgggaaacactgagaccccatctctacaaaaataaaaaattagcaggaactatggtgggaggatcacttgagcccaagatacagaggctgcactgagtcgtgatggcaccaccccactttaaaaagaaaaacaaaaaaagctgggtatggtgacacccgcttgtagggctgagtgaatgggaagttcacctgggcccaagagttcaagactacagtgagctatgattgcactactacactccagcctgggtgacagagtgaggctccagctccaaaaataaataaaaaaaataaaaaccccaccattctaccattctcaaaggcctaaaagatcctcataaatcaatatacacctatcctataaattatgtcccttttattttatgtctgaattaacggctttttatttcaactctgtacagtcttcaaccaccttttagacattaaaaatgaagcaaagatattaaaccattttgaaaccatattggtttaaaataccaatatgctggtttcatttatctttaagttctgacatttctgctcaagtacacaacttactatataatcaatatcctattttatttagcaacatgttcagcaaaagtatatgctcctaaaagcgagttttatcctaacagtaaaattttcatcagttagattaatttttttatgactgtatcacacatgcttctttctccttattcaaagcagagtacaatgcctggggttcatttcttgtgtcttttccactgaaccctcattggatgtgctatatacagtgcagctaatgtttgaggctgctgaagtgtggcaatctagctacctcatttttaatttgtttatgttctttgatatcaggctatcaaagaatataaagatatacaagttttcatatgagttccatcttatgctcagagaaggttactttctgaggcttctcctatagtgtgctattcgtaatatgttgaaaaactaaaaggaaacccaataatttaaaagtaaaattataagaaatattatttcttataataataccggcgcaggagggcagcaccagaggccagtggcactcccagctcggtgagagggctgggaagccagggaataaaactgggagggtggggtggggctggtgtttggggcacctcaaactcacaacattgggaatctttgtgggtccgggaatggtaatcctgaggcctcagaacacaggtttcagattgataggcctgcaggtctccaggcagcaaccagctgagcgactaaagggcccaaggccagggctctagggatggggctcagcagaggctggggtaaggggagccagggaggagctgggcctaatgcagcaccgggtccccaggatgccgtgtctcggctggaggaggagatgcggaagctccaggccacggtgcaggagctccagaagcgcttggacaggctggaggagacagtccaggccaagtagagccccgcagggcctccagcagggtcagccattcacacccatccactcacctcccattcccagccacatggcagagaaaaaaatcataataaaatggctttattttctggtacctcccagactctgatgactggtcccctagacacgcagtttgctgaaccaaccagccctagagcttcccctccaccgcgctgaggggactgacccatggcaggggatgtgggatgccccctgacttactacatcacaggaacagggccttcgtgggtagaaaccagccatgctgatgtgggccaggaggctgctctccgtttccgagctccttctcagagctgacacagctgaactatttaaggccctagcttagaacctcaataattcccaaatttaccaaaaatctgcctttcctagtcaaccaaaacatcacgttgcacgtgactctgctggcactgttgcttgtgaggaaatgaaccaaccatcacttacagggtaggcatcttttaaactgcaggtccaaagataaaaataacgagggaggctgggcatggggactcacgtctataatcccagcactgtgggaggctgaggcggcaggatcatttgagcccaggagtttgagacctgcctgagcaacacggcgagataccgtctctacgaaaaataaaataaaaaattagccaggcatggtggtgggcacctatagttccagctactcaggaggctgaggcaggaggatcccttgagcccaggaggtcgaggctgcaatgagccattgcaccactgcactgcagcctgggtgacagagcaagacactgtctctaaaaaatataaataggccgggtgtggcagctcacgcctgtaatcccagcactttaggaggccgaggtgggtgaatcacctgaggtcagaagttcgagaccagcctggccaacatggtgaaaccccatctctactaaaaatacaaaaattagctgggcatggtggcaggcgcctgtaatctcagctactcaggaggctgaggcaagagaattgcttgaatccgggaggcaaaggttgcagtgagccgagatcatgccattgtactccagcctgggggacaggagtgagacttcgtctcaaaaaaaaaaaaaaaaaaaatatatatatatatatatttttttttttttaaatgtataaatacatcatatatattttaatatataaatatattatatatattatatattttaatatataaatatattatatataatatattttaatatataaatattatatatattatattttaatatataaatattatatatattaattatatattttaatatataatatatattatattatataataataaattatatattatattatatagtaataagttatatattatactatataataatatagtataatatataatatatattataatatattatattatattatattatatattataatataaattatatatattttatatatatgttttatatattatatattttaatatatgaaacaggggaacttcttctaaggaaaagacagaattaaggcaacaggctgatcctagtttaccagagaagaaactgaggccgggagcaggagcccagctcactgaagggcagatcccaagtcagagtccaagtctccccacttttttatttatttaattttttctgagatggagtttcattcttgttgcccaaattgagtacaatggcacaatctcggctcaccgcaacctctgccttctgggttcaagccattctcgtgcctcagactcccaagtagctgggattacaggcatgtgccaccacgtccggctaacttttgtgttttcagtagaggtggggtctcaccatgttggccagactggtctcaaactcctggcctcaagtcatctgcctgcctcagcctcccaaagtgctgggattacaggcatgagccgctgtgcctggccttatgtctccccttttgaattcagagccttcccccgtgtagtgagtgcttctgcctctctagcccttcctgtgggttctgcctgggcctgacctctgtgagagacctggcaggaacaggtctgtcaggccttgtggggagtgggtgtgggaataggttttgatacccaacttagcaggtgatcctgagatgggaggacacagggctgtttgggatgggcgtcttagccatagtaaggtttggttcatatcaagcagggaccacccatggcgtcatttccaggccccacctcttcagtatgccatagaaaactacttgggcagtagaggtgtgggaagaaaacaaaaaagaaagctgggcataagtggcacacgcctgtaatcccagcacttttggaggccgaggcgggtggatcacctgaggtcgggagttcaagaccagcctgaacaacatggagaaaccctgtctctattaaaaatacaagattagccgggcgtggtagcacatacctgtaatcccagctacttgggaggctgagacaagagaatcgcttgaacccaggaggcggaggttgtggtgagccgagatcgtgccattgcactccagcctgggcaacaagagtgaaactctgtctcaaaaacagacaaacaaacaaacaataaaaaaaccccaaaaattagctgggcatggtggcgtgtgcctgtaatcccagctactagggaggctgaggcaggagaatcgcttgaacccgggagggggaagttgtagtgagccaagatcatgctactgcactccagcctgggcaacagagccaagactctgtctcaaaacaaacaaacaaacaaacaaaaaaacgcaggaaaagagtgtgtgatggctgaaacttgcaatttctcactctcaacgagccctggccccaactaggttatttgggctccctccctaggtctcagggacctctgttcaaagtcctagcaatctgggccaggtacaatggctcacgcctaaaattccagcactttaggagaccaaggcgggcagatcacttgaggccaggagtttgagactggcctggccaacatggtgaaaccctgtctctactaaaagtacaaaaattagccgggcatggtggtgcacccctgtaatcccagctactcaggaggctgaagcacaagaatcttttgaacctgggaggcagaggttgcaatgagctgagatggcgccacggcactccagcctgggcgacagagcaagaccctgtctcaaacaacaaaaaacaaataaaacaaacaaggtcctagcaaccctactaacctgttatgaagactgatacaggggcatcacctgccccaattttctgactcaggtcagccttatattcctactctaatctcacccctatccccgtcccacacccactattcttaaaacctccatggtcctccgggggcagctgtagacacattaagcccagggctatggggccactggaaccttctccagtgggtctgaaaacatcagcattccaggagttgatgagcccctacctgggcaccactccctcttgggcctgagaaggccggggggaacctgcaaggaatatgtggaattctatatggtgcctctgatactgcggtaatgtcagggagaggtttgttcaactggtcagggccctgaaaccccgatcactttctcatctctgcatcttgaaggctagcagagaggaggaaccctgagctctctaggaggtgggtaggtggtggcagtacagactcctagatgtctaaacggagttgcagagagaaggctttctcggtagaccctggaagggacttttacggtagaactttcattttacaagcagggatagaggcctagatggggacagagacgtgtccaaggtaaaacaatggacggaggcagggcagggagaggccaggtcctagactcggcctcagcacccctcccacacacacatcgacacagaagctggtccagatttataatttaatggctgtgcagatcccagtccctcatttctgtcgctcacgtgcccactggtctggggtcagggttttctgttcaaaggcatggatgtgcgggagctcttctgctaggcacgcgttcaccagcctggggcgagagatggggttaggaaaaggccagcggtgatcgcacaccccgaggctagggtgacccaagagactggtgtccccaaggttgtagtccccaggccgtgggaacacgtacttggagagagggtctacatcgaaatactcgaagcaggggtcacgaaggcgggatcctcaaggtccctgagccacgccagggggagtgcgggagtcaggttgcaggggtagggggagtggctggggttgtggtacaggagctaggcaaggtgctcccagggccttacctgtgtctctgaagcagcggtttcccctcgaacttggccgacaccaccaggactcggaagctacaggagcaacggttgagggtcgtgtcctccacctcctaccgagcggaagaatatgaatggtgccgaacccgccccccgagctcttttccccttgtccggcggctcaactcaccacatgctccgcctccaggtcccgctgcagcttctcgcggaggtattcggcgctgagttccatggcggcagtccagctggaacggcagcccagcagggacacaaccccagctcgggcgccggccacgctaccttgctgccttacaggagccacttccgctggaaaactcacttccgcccttactaaggcgtacgtcaacgcagtacttccgccctcaagcagccgggctttccagcggtccaggcttttcgcgcttgccatgtgtcagccaatcagagcctgaggaaggtgggactcgggcggagccgatgctgaatggtacgcgctcgccgactggacagcagtctggcttccgcggtcggacttctacacccgcctccagacaggagaggggcacgtaccggcgctacggcttcctgcaggctgcctccggatagtccccgagagcttgttccgaagcaagcaccctgcagccctagcgatccagccctcccctggaccctaggtcacggcaatcaaccccctgctgtggttcccgaaccccaaggcccgatgggtcccgcgggggtcgcggcgaggccagggcgctttttcggcgtctacctgctctactgcctgaacccccggtaccggggccgcgtctacgtggggttcactgtcaacactgctcgtcgggtccagcagcacaatgggggccgcaaaaaaggcggggcctggcggaccagcgggcgagggccctggtgagagggggaggccttctgtgccgggaggaaggcgtcccagaggaggcggaccccgcggggcacaggcctgttgagaaggaccggccaggactgtgacagaggcggggcgtctgtggtggggacggggcctgtcgcaggggaggagcgtgacggggaggcggtgcccggggcatctccgcggcggaactcagggaaggagctagctggggcgggggtgatgatccaggctgggttccagcatagggctcttggtgggcacgctggggtcgggtggaatgcaggagagagaggaggtgggacaggtgggtacctgggctggaggcagggcctgaggtgggcaggtgcagagggctgcacttctcggctgaagccgggaatgaggaccccgctctcgggtgggattggaggggacccgcggctgaggcgctgggctgcgacagggacatcacggttctcctcctcagggagatggtgctcgtcgtgcacggcttcccgtcctccgtggccgcccttcgggtaaggaaggagaccgggcagcggcggccgggtgagggcttgggttccgcccctcgctccgagccgccctgatgcccctgtacgccgcccgcagtttgagtgggcttggcagcacccgcacgcctcgcgccgcctggcgcacgtggggcctcgcctgcgaggagagacagccttcgctttccacctgcgcgtgctggcgcacatgctgcgcgcaccgccctgggctcgcctcccgctcacgctgcgctgggtgcgcccagacctccgccaggacctctgcctcccgccgccgccgcacgtgcctctggccttcgggcctccaccgccccaggccccggccccaaggcgccgcgcaggtccctttgatgacgcggagcctgagccagaccagggggatccaggggcctgctgctccctgtgcgcccagaccatccaggtgaggtccccccgaggaatggatggctctagagtccagacgacttcggatccagctctttcttgagggaaacccactgacacgctttggccaccctatccccatctctaagatgctgatgctataggacttacggccattcctgagcaaagcaggccctgctcagggccttcaccatttccccttcaaagaaaaggttcttccctaggccatcagtactccgctgcactccagtgtggtcgacagagcatgaccctcttttttttttttttttttttgagatggagtctagctctgtcgcccaggctagagtgcagtggcgcgatctctgctcactgcaagctccgcctcctgggttcacgccattctcctgcctcagcctcccgagtagctgggactacaggcgcccgccaccacgcctggttaattttttgtatttttagtagagacggggtttcaccgtgttagccaggatggtctcgatgtcctagcctcgtgatccgcccgcctcagcctcccaaagtgctgggattacaggcatgagccaccgcgcccggccctttttttttttttagacagagtcttgctctgttgcggaggctggagtgcagtgatctcagctcactggaagctccgcctcctgggttcaagcgattctcctatctcaacctcccaagtgtgccaccacacctgccgaatgtttgtgtttttagtagggatggggttcgccatgttgggcaggctggtctcaaactcctgacctcaagtgatctgcccgcctcggcctcccagagtgctgggattataggcgtgagccaccatgcctggacatgaccctgtctctaaaacaatgtaatgaactgcagctcattcttgtgtgcacttttctgcaccccctttcccttaacacttactattgtctggcatgctacgtgttttcttgatctcattagcctctcccaccccaactgccacactgcactatcagagggcagcacttatcactgctgtagaacaaagtcctgcactgagccgatggcccagaaattttctttttatttatttatttattttttttttgagacagagtcttactctgtcgctcaggctggagtgtagtggcgcgatctcagctcactgcaacctctgcctcctggtttcaagcaattctccttcctcagcctccagagtagctgggattacacgcgcctgccaccgcgcctggctaatttttgtatttttagtagagatggggtttcaaccatgttggccaggctggtctcaaactcctgacctcaggtgatcctgcccacctaagcctcccaaaatgctggtattacaggcatgagccaccgtgcccggcctaaatatttaataaaataatggacgatgggtgccttctactgagctcccggtaattgtgagtgagtagaggacttgccctggggacattcagtgacctgctgggtgttgctgagctgtgaggaagttcaggtctggctgcagtggtgaggctgtgactcaatcaatcactgctgatgctcccaggacctgcaccagcttagtcctaggggcaaggattttaactgtccacctcagtttcttcatttgtaagatgcaaataacagtcacccctgcctcatgggatggagctgtgtaatgcccgcaacagtgcctgctgcatagaggggttgctgccagctgcctctccctccttgtctcttacctgcctgctgcctgggtcaggatgaagaggggcccttgtgttgcccccaccctggctgcctgctaagggcccatgtgatctgcctggcagaggagtttcttcaggaagaaccagggcagcttctgcccctagagggccaatgcccttggtgagtgcagtcccctggccccagcctggtccacctctgggaagagggtgcccagttgtgcaatccaggcccaggcagctgagccctcatctcagcatccagggcggatactggagggggcttgtggcatctgactctgtatctcctacctgcccctctccttggtagctgtgagaagtcactgctttggggagacctgatctggctgtgccagatggacactgagaaagaagtagaagactcagaattagaagaggtgagtgggctttggtggcgggctccctaccccactccctgccctgggctgcctgtgaccacactgcttgcctctgcaggcacactggacagacctgctggagacctgatcctcagtgtccttaccccctcctacctcttttctgtgccacctgctgtgggtccagcaggtttttacttgagtacaataaaaagtctgagtcaagggtgccttatggtggatgctgaggggaggggcggagctagtagcccaaggtcctgccagtcacggggcttcctcaggggcacagaggaggcaggaggggcccctggccctagcacgtgaacagcttctactctgcctggaaaccccatgcctcagctttcccctacttgcctctgagctcatgcaattcttggaagcctgggagacttaccttgaaattgaatgcaaataggacaaagaccaaggaggatggggggatgccctccttccacggggccctgtggcttccaagtcttaatctcctctagtctcttgtctacggagcctccttcaaacccagggaaagaaaagcacctgccagggttgtttttcttctaggatcttctattgatgctctgtgaggtcccccaggagccatgaagctagggctggctcctagggcaatgggactacagtgtccttgtcctttcttattctttctgttctttctttctttctttttttttttttttttttttttttgagacagagtctcactctgttgcccaggctggagtgcagtggtgtgatcttggctcactgaaacctccgcctcctgggttcaagtgattctcttgcctcagcctcctgagtagctaggattacaggtgcccgccatcatgcccagctaatttttgtatttttagtagagacagggtttcaccatgttggccagcttggtctcgaactcctgacctcaggtgatcctgctgcatcgacctcccaaagtactgggattacaggcgtgagccaccacgctcagcctctttcttgttctatatgtccatgctctgctccacttctgccccttcactctgcccccacacatcactccagactggccttgtggtcagagcctggaatgcctgggctgctgggggcctgtggactgcactgggccagaacccctgccgccttcaagactggcctgtagccagcaggtaggtgacttttcccaggccggcctatcccacctttcccctccactcactcacctcccttgcctgggtcaattagagaaagcttgtcggccaggcatggtggctcatgcctgtaatctcagcactttgggaggccgaggcgggcggatcatctgagctcaggagtttgagaccagcctggccaacatggcaaaaccccgtctctactaaaaatacaaaaattaaccggatgtggtggtgtgcacctgtaatcccagctactcgggaggctgaggcagaagaatcgcttgaacccaggagggggaggttacagtgagcggagatcgtgctactgcattgcagcctgggcgagagagcgagtctccatctcatataaaaaaaagaaaaagaaagaaagaaagcttgtctgttggcctgccctgcagggtggagttcagagggaaggtcaggagcctagtgacagctcaaaaaaaaaaaaacccaaataccaatgttggccccttttgcctttcattcatgtgttttctatacactaaactcacatattgggtttgcagatcactccaagcttggctggagctgtggtggtaaggagggtaatagagaagcttccccaccctcaaccccaccccttccttcctggagttcccagccctgactttagatccctcccacactggaccttcaaaaccctcagggcagagagcagccctacactccctacaccacacccatactcagcccctgcaggcaaggagagaacaggtcaggttcccgagagctcaggtgagtgacacgttggaatggcccagggcaccttcaccctgctcagcttgtggctccaacattctagaagccgaggcctctgccatccctgccctttcccatggatattccatttcaattagacaacccagcctggccggaatccccctgcgttccttcttttcctttgtgtatttttgagacagggtgttgctccgtcacccaggctggagtgtagtgggatcctggcccactgcagcctcaaattcctaggctgaggcaatcctgccgcctcagcctcctgagtagctggggttacaagagcaagccaccacacccagctaattttgaaaaatattttttgtagaggagaggtcttgctttgttgtccaggttggtctcaaactccagggctcaagggatcctttcccgttggcctcccaaggctctgggattacaggcgggagtcaccctgcctgggcccctccttttgatgagtcatcagttttcattcccgcacgaggctctagcccctggtaccagcttagttgctcaatgggctgtgtttgttctggagcccagatggactgtggccaggcaagtggatcacagacctggccggcctgggaggtttccacatgtgaggggcatgaggggggctcaaggaggggagcatcggggagaggagcgcactgggtggaggctgggggtcccagcaggaaatggtgagacaaagggcgctggctggcagggagacagcacaggcaggccctagagcttcctcagcacagctggactctcctggagaccttcacacaccctgatatctgggccccgcgctacgagggtgctttcactggtctgcactatgccccaggccctgggattttgaacagctctgcaggtgactgaaaggtgcggccaggctggggaacgacctggtttcagccccagccccgccactgactgactttgtgagtgcgggcaagtcactcagcctccctaggcctcagtgacttccctgaaagcaaaaactctgcaaaggggcagctgggtgctggctcacacctgtaatcccagcactttgggaggctgaggtagacaaatcacttgaggccaggagttctagaccagcctggccaacatggtgaaaccccatctctactaaagaaaaaaaaaaattagctgagcatggttgtacatgcttgtaatcccagctacttgggatgccgaggcgggaggattgcttgaacccaagaggtggagtttgcagtgagctgagattgtgccacactgcactccagcttgggtgagagtgagactccatctcaaaaaaaaaaaaaaaaagagagaatcccactttcttgctgttgtgatggtggtaagggaacgggcctggctctggcccctgatgcaggaacatggagctgatccaggacacctcccgcccgccactggagtacgtgaagggggtcccgctcatcaagtactttgcagaggcactggggcccctgcagagcttccaagcccgacctgatgacctgctcatcaacacctaccccaagtctggtaagtgaggagggccacccaccctctcccaggcggcagtccccaccttggtcagcaaggtcgtgccctcagcctgctcacctcctatctccctccctctccaggcaccacctgggtgagccagatactggacatgatctaccagggcggcgacctagagaagtgtaaccgggctcccatctacgtacgggtgcccttccttgaggtcaatgatccaggggaaccctcaggtgcatggctgggtcctgggggtaagggaagtggaggaagacagggctggggcttcagctcaccagaccttccctgacccactactcagggctggagactctgaaagacacaccgcccccacggctcatcaagtcacacctgcccctggctctgctccctcagactctgttggatcagaaggtcaaggtgaggccgggctcaatggttcacacctgtcatcccagtttgagactgaggagggaggatcccttgaaggcgagagatggagaccagcctgggcaacattgctgtagagatgacatcccatctctacaaaaataaaattaacaacctggtatggtggcatagactgttcccagttacttaggaggctcagcggggaggactgtttatgcaaataggaagctgcaatgagccctgatgatcctgctgctgcactccagcctgggcaacacagcaaaaccatctctacgaaaaaaaagttcccactgactggcaaggaaagccaggaaggggggctcaggtgccctctcagccatgtacctgttcttctggaagggcctcctcgcttctgccaggctcatcacatcttttttttttttgagacagagtcttgctctgtcaccctggctggagtgcagtggcatgatctcagctcactgcaacctccgcctccccagttcaagtgattctcctgcctcagcctcctgagtagctgggattacaggcgtgtgctaccacacccggctaatttttgtattctttttagtagagacggggtttcaccatgttggtcaagtggatctcaaactcttgaccttgtgatcctcctgcctcgacctcacaaagtgctggaattacaggcgtgagccaccgcgcctggccctttttttttttgagacagtttcactcttgttgccgaggctagagcgcaatcgtgtgatctcggttcactgcaaccaccgcctcctgggttcaagcaattctcctgcttcagcctcccaaggagctgggattacaggtacctgccaccacgcccggctaattttgtatttttagtagagatggggtttcaccatgttggtcaggctggtcttgaactcctgacctcaggtgatctggccaccttggcctcccaaagtgccgggattagaggcatgagccaccacgcccagccttcatcacatcttgagagaggacactgtctgcctcttgctctgatgagggtctgatgcaaggatagtgagtctctacagtgcacacttaagaaaggcagcatgtgggtgctcacaggtcagcggaggagggggagctggtggggaccaggcatgccttgctccagatcaggatatgatggcattggtgcagattatattagtatagaatatggtctcaggaaccaggcaggactttggcttccgagcagggttcagatcccagcttggccctacctgtgcagtgagatctcaagcaagtcagcctctaagcctcaggttcctcctttgccagttcaacagatgagctggcctggggtgggctgtgtggtgatggtgctggggctgggtcctctgcccctgcaggtggtctatgttgcccgaaacccaaaggacgtggcggtctcctactaccatttccaccgtatggaaaaggcgcaccctgagcctgggacctgggacagcttcctggaaaagttcatggctggagaaggtgggcttgactggaggaaggagggtgtgaagccgaggggtggtggctataacgtacagcaaccctgtgtcggtgccccctgcccgcttctctagtgtcctacgggtcctggtaccagcacgtgcaggagtggtgggagctgagccgcacccaccctgttctctacctcttctatgaagacatgaaggaggtgagaccgactgtgatgcttccccccatgtgacacctgggggcaggcacctcacagggacccaccaaggccacccagccccgtccctgggcggctcccacagcaagcccggattccccatcctacctccctggcccaggcccccccactgcagccccacctggcagcaggctcggcacagctttcatcttctgcacctgagtcagctgcatgggtggccacggatcagatacttagtcctattgcttatcctcaccaaagggtgtgccacccagggccacagtcatggaagaagaccatcccggtcctcacccataggcgccaagccctgttcatgatgggatcacagggcagagatcaattcattttactccagagactagggccccaggggttgaggctctttggggtttctaggggaagtggccagatcccctctgaggttagagagggggacccgttttgttttgctccactgaggagccctctgctgctcagaaccccaaaagggagattcaaaagatcctggagtttgtggggcgctccctgccagaggagaccatggacttcatggttcagcacacgtcgttcaaggagatgaagaagaaccctatgaccaactacaccaccgtcccccaggagctcatggaccacagcatctcccccttcatgaggaaaggtgggtgctggccagcacgggggtttggggcgggtgggagcagcagctgcagcctccccataggcacttggggcctcccctgggatgagactccagctttgctccctgccttcctcccccaggcatggctggggactggaagaccaccttcaccgtggcgcagaatgagcgcttcgatgcggactatgcggagaagatggcaggctgcagcctcagcttccgctctgagctgtgagaggggctcctggagtcactgcagagggagtgtgcgaatctaccctgaccaatgggctcaagaataaagtatgatttttgagtcaggcacagtggctcatgtctgcaatcccagcgatttgggaggttgagctggtaggatcacaataggccacgaatttgagaccagcctggtaaaatagtgagacctcatctctacaaagatgtaaaaaaattagccacatgtgctggcacttacctgtagtcccagctacttgggaagcagaggctggaggatcatttcagcccaggaggttgtggatacagtgagttatgacatgcccattcactacagcctggatgacaagcaagaccctccctccaaagaaaataaagctcaaaataaaatatgatttgtgttcatgtagagcctgtattggaaaggaagagaaactctgagctgaaagagtgaatgcccggtggggccacatatggtcacctctcccccagccttcagctccccaggtcaccatatctggggaggggagaagggtttggagaagtaaaacccaggagatgtgtggaggggggatgtctgtttaatcccagcacatcctctgctgtcctgccccaagatggtggaggacgtcgagtccgccgggcagcgtcactttttcttgggctccttagaagctaccaggtacctctgggccacactgagatgaggggagtagccgtctgcataggaggtgtcttcaaacaggatagaatagtcctcctggggctgtggggcaggtggacaggaagggcagagagcagccccggggctggtgtcactcacttgttggtggcatggctgtaactgaccacctcggccaggatccactgctcatccccatccacggccttcacccgggcagccaccttgtctccaggtctggccacgtagtctcctgaggcagggatggccccacagaggggtgggggcctgtgagtggaacaaaggatcagtcccagcccctgggcaccagccccttcctcgcagctgctgccctcacttgtcaccaggcttcccaatccacaggggcagggtcatggccgactgctgcagcagggtcatcagcacccctctgcgcatggtcttccggggtggctccaagtcattgtagagacccgcgatcttggccactgtgggaagaaagggaggcctgaggccccagggacaggggctggccctgaccccccagcatgctgaactgagctgctggaggagcacctgggagcccccagctcccgagtgagcccgagggcacagcaggactgtgacctgatctgccaggtgtcctacaggggctgctgcgctcaactacatatgggtgagacggcagcacaccaggcacccaggggaaggaaccagggagggacaaagcgggttctgaggtgctggtgaggttctcttcttgatgtcggtgctgacacagaagtgtgtttcgttagtgaaaagttcctaaaattcgaagggtcccgcgggaatcggggcgaggccgggtgcctcttcagcgtccagctgctctactgcctgaatccctggtacccgggccctgtctacgtggggctcactgtcaaccctgttcgtccagcagcacaatggtggccgcaaaaaaggcggggcttggcggaccattggccgaggtccctgttaagagggggagggtctctgtgcccggaggaaggctccctggaggaggcggaaccggggggcacaagcctgctgagagggacccactaggtctgtgacgtgcgcgggacgtcccgggcgaggcctgttggtggggggaggctgtcgcaggggaggagcctaacggggaggcggtgccctgggaatctcggcgttagaactccggagagcagctggctgaggcgagggtgatgatccaggctggggtccagcgcaggggtcttggggggcacgctggggtcgggtggagcgcaggagggagaggaatgagaacaggtgggtacctgggctggaggcgggacctgaggtgggcaggtgcagggggcgtgccttcaggcagttgcggggccagggctcggctgaagctgggagtgaggaccccgttctccggtgggataggaggggacccgcgatgctgggctgcgctggcggtagggcgcggcggggctcacaggaacattcctgttgtcctccccatggagattgtgctcgtcgtgcacggcttcccatccgccgcggccgcccttcgggtaaagaagaagaccgggcggcggcctgtggcctggatttggggtccgacccccgcccggagccgccttgactccaaccccgccgcggttggagggggcctggcacccccgccctgggcgctcctcccggtcccgttgcgccccgacctccgtcagccgcacggcactggccactgaccgtcgggcctcctccgccccagggcgccgcgcaggtccctttgctgacgccgagcctgagcctgagccggtcccggggtccaagagggctgtgtgcaccctgcgcgtccgcgcgctccaggggaggtgcgctccaggggaggtccgccccaagcagagcggcacatcctccagacgacttcggatcctgctgttgaggagccaggaaacgccctgacactgttgcggccctgtccacatctctaagatggggatggatgatagtacttctggccattcctgagcacagcaggacctgccttttccctttgactggaaggttcttctctacatcttcagtcttgataacctgccacctccacagggaggtcttccctggctcccaatttaaaattgcagctctgagaagccgggcatggtggcatatgcctgtagtcccagctacgggggaggctgaggtgggaggatcgcttgagcccaggagttggaggctgaagtgagctatgatcactccattgcactccagcctgggggaaacagcaagaccctgtctctaaaaaaataaaatacaataaaattgcggctctttcttgtgcacttccctgcccgcccccctttcctgaacccttattattttctgccatactacaaattttatgcatctcattaaaccccttccgaacctgtgtactaaactgcctgggggcagctctcatcactgctgtagaacaaagtcccacatagagccaatggccaagaaacagttaataaaataacagacgatggtcctggcctctactgtgagtgagtaaagggcttgccctgcagagattcagtgatctggcgggggttgctgagctatgaggaagttcagatctggctgcaggggtgaggctgtgactcagtcaatcactgcccatgctcacaggacactggccagcttagtccctgggggcaaggattttacccccccccccccacctccatttcctcatctctaagatgtgaataatcgtcgcccctgcctcacaggattgagctgtgtaacccccctcccaccttttttctatgccatccactgcgggtctggggctttttactggaatgcaatacaaagtctgagtcaagggtgccttctgttggttgctgagggcggaggcagagctagttgcctgtggtcctgccagtcaaggggcttccagaggagggaggaggggcctgtggccctagcatgtgagcagcttctcctctgcctggaagccggacgcctcagcttctcccacactcccacctgcccgcttgcctctgaattcacacaattcttggaaggcttgggagactcacctttactcaaatggttacctgtctcgtgtctcgtgcccagcttgaccttttttttttttttttttttttttttgagttggagtcttgctgcgtcacccaggctagagtgcagtggcgtgatctcagctcactgcaatctccgcctcccgggttcaagcaattctcctgcctcagcctccccagtagctgggattacaggtgcccaccaccgtgcctggctaattttcgtatttttagtagagacagggtttcaccatgttggccaagctggtcttgaactcctgacctcgtgatctgcccaccttggcctcccaaagtgctgggattacaggcgtgagccaccatgcctggccccagcttgaccttgaactttaaatagtgaagacaaagaatgaggagggtggggggatgccctccttccacagggccctgtggcttccaagcctcaacctcctctggtctcttgtctgtggagcctccttcaaacccagggaaacaaaagcacctgccacgggctgctgtttttctaggatcttctagcgaagctctgtaacttcccctgagagccatgaaactgggctggctcccagggtgatgggactccagcgtctttgttctttcttgttctatgcatccatgctctgctccaccgctgccccttcaactctgcccacacatattactccagactggccctgtggtcagagcctggaatgcctgggctgctgggggcttgcatgcaggctgcactggactagaagcattggcgccttcaagactgccctgggaaacatgacctgccctgtttctgtctagtgagtacccatttttccccactcaccggctcacttcccttggctgggtcaattagaaaaagctcttctgttggcctgccctgcagggtggagttcagagggcagctcaagagcccggtgacagctcaaaaaataaaaaaagccgccaggagcagtggctaatgcctgtaatcccagcactttgggaggccgaggcaggcggatcacctgaggtcaggtgttcaagaccagcctgaccaacatggtgaaaccccgcctctactaaaaatacaaaaattagccgggtgtggtggcggatgcctgtaatcccagctactcaagaggctgaggcaggagaattgcttgaacccaggaggtggaggttacagtgagccgagatcctgccactgtactccagcctgggcgacagatcacgactccatctcaaaataaataaataaataaattatacattgggctcttttgccttttattcttgtgctttctaatcacaactaaacactaaactcacatcttggctttgcagatcactctaagcttggctgcagctgtggtgctgaggaggctaatagagaagctccctcgctctcaaccccaccccttccttccgggagcaaacccaagtctggtcccgactccggatccctcccacattagacctaccacaccctcagggcagacaacagctccacacaccccacactcagccaccagggcaagggagcaaaattccagaaagctcaggtgagtaccagagtggaatggcccagggcgccctcaccctgctcagcttttggagccaacattccagcagccaaggcctctgccatactggctgtttccccacggatatccagtttcactaggggaactccagcctggcttcccttctttcttttttatttttgtttttttgagacaaggcttggctctgacacccaggctggagtgcagtggccaaattgtagctcactgcagcctcaaaatcatgggctcacatgataatcacgcctcagcttccctggtagctgggtgtacaggagagagccaccatgcccagctaattttttaaacttatttttaatttattttttatttttttgagacggagttttgctcgtgttgcccaggctggagtgcaatggcatgatacagctcactgcaacctccgcctcctgggttcaagcgactctcctgccttagtctcccaaggagctgggattagaggcatgcgctatcacaccctgctaattttgtatttttcatagagaaggggtttctccatgttggtcaggctggtcttgaactcccgacctcaggtgatccgccccaccttggcctcccaaaatgctgcgattacaggtgtgagccaccacacctggctgcccagctcagttttaaatattttttttctagagatggggtcttgctgtattgcccaggttggtctcaaagtccaaggctcaagtgattcttccccactgggcctccaaagctctgggattacaggcatgagccatggtgtcccctcctcattctgcggaatcatcagagttttgttcattcccacaccaggctctggcccccagtaccagctcagttgctcaatggaccatgcttgtcctggagcccagatggactgtggctgggcaggtggatcacaggcctggccggcctgggaggtttccacatgtgaggggcctgaggggctcaaggaggggagcatcggggagaggagcccactgggtggaggctgggggtcacagcagaaaatggtgagacaaagggtgctggctggcagggagacagcacaggcaggccctagagcttcctctgtgggcggcaagccacccaggcaccgaggcaagagacagaggacacgatctgttccagtataataaaatataaaacaagaatagttataccagatatagatcttagatatgattatatatgaatatcattaatcattagtttgtagcaattactttttcttccaatattataataatccttgctctataatcatagcctaggaaaaaccaggccatacagagacaggagctgaagggacatagtgaggtgtgactgcaagacaggagtgcgagccttctgttatgcccggacagggccaccagagggctccttggtctagcggtgacgccagcgtctgggaagacgcccgttaccaggcggatcgtggtccagcggtagcaaaaggtgtcaagaaacaacacccgctactcagcagaccaggaaaggggggtctccctttccctgggggagtttagagaagactctgctcctccacctcttgtggagggcctgacattagtcaggctcgcccgcagttatccggaggcctaaccgtctccctgtgatgctgtgcttcagtggtcacactcctagtccaccttcatgttccatcctgtacacctggctctgccttctagatagcagtggtaaattagtgaaaatactaatagtccctgatatgcagaaataatggcataagctgtctttctctttgtctcctctccctctctgcctcggctgccaggcagggaagggccccctgtccggtggacacatgacccacgtgaccttacctatcattggaggtgactcacattctttaccctgccccttctgccttgtatccaataaataacagcgcagcccgacattcggggccactaccagtctctgcacattggtggtagtggtcccccgggcccagttgccttttctcttgtctctttgtcttgtgtctttatttctacactctctcattgccgcacttagggagagacccaccgaccctgtggggctggtccctacagagaatgacttgaacctgggaggcagagattgtagtgaggtgagattgcaccactgcactccagcttgggtgacagagcaagactctgtctcaaaaaaaagatgaggtgagttcagtttgggaaatgttgaatgccagatgcctttggcctattcagagggagattgccgaagcacagaggagagttcatgacagggtttaattatttttagtgctctcatgtcccagattcggccaattggagtccctccacgctggttcctgtgtcctgtgacatcacccatcttctttctccttttcttctttcataagccacttccttcctggcatgacagtgtgttccaggaccatcttgtaccttgcacctgccctgccctggccctagaatcagccaattctctgaggcatcctgattcctttttgtgggggaacggtttgagaacaaaatatactactacatgatactatattctgacaggaaaaaacacagccataagaaataaagccatggccgggcacagtggctcctgtaatcctaacactttgggaggctgaggcaggaggattgcttggggccaggagttcaagaccaacctggcccacatagtgagccctcatctctattaagaaaaaaaaaaaagaaagaaggaaagccatatttggatgagtttagtcttctgattatttttgctgaagttttaaattattattattattattttttgagacagagtctcgttctgttgcccgggttggggtgcaatggtgcagtctcagctcactgcaacctctgcctcccaggttcaagcaattctcctgcctcagcctcttgagtagctgggattacagattcctgccatcacgccctgctaatttttgtatttttgttagagatggggtttctcaatgttggtcaggctggtctcaaactcccgacttcaggtgatccggctgccttggcctcccaaagtgctgggattacaggggtatattttatatttaaagtatatttaaaaattaagggccaggctcagtgtctcacgcctgtaatcccagcactttgggaggccgaggtggctggatcccatgaactcgggaatttgaaaggcacaagagcgaaactccgtctcaaaaatatatgtaaaatatattttatggccaggcatggtggctcacaaccgtaatcccagcaccttgggaggccgaggtgggcagatcacctgaggtcaggagttcaagaccagcctggccaatatcgtgaaacgctgtctctactaaaaatacaaaaaattaactgggcgtggtcgtgtgcacctgtaatcccagctgctcagaggctgaggcaggacaatcccttgaacccgggaagtggaggttgcagtgagccgagatcgcaccattgcactccagcctgggcaacaagagcgaaactccacctcaaaaacaaaacaaaataaaacaaaacaaaacaaaacaaaatatatgtatatacacacacacattatatgtaatatctacttttaaatataaacataaatattataaagcttttattgcaattgttcattttagaaacttcagaaaatacaaattagtaaaaagaagaaaataagtctgtaataccacttttaagaactattttaaaaacctctagcttttttttgagatataatttacataccaagacttttttaaaaaaaaaaattcataatggtgacttttttatcggactgtatagaataaagcttgttaaaatgtctaagatattttgtaatatatgaaaatttcagctaaacttgtgctatagcatcccatggtttgaatatattattgaaaatcattccataaacaatggtttggtatatagttttaacaattcaaggctgggcacaatggctcacgcctgtaatcccaccactttgggaggaggaggcaggcaaatcacctgaggtcaggacttcaagaccagcctggccaacatggtgaaaccctgtctctaataaaaatacaaaaattagccgagcatggtggcaggtgcctgtgatcccagctactgaggaggctgaggcaggagaatcacttgaacctaggaggcagaggttgcagtgagccgagatcttgccactgcactccagcttaggcgacagaatgagactccatctcaaacaaaataaataaataaaataattcagcaggatgaggtggctcatgcctataaccccagcactttgggaggctgcggtgggactattgcttttgcctgggagttcaagaccagcctgggcaacatagagataccatgtctcagaaaatatatatataattaattttaaaaaagagaattcattgatgattctgtatttacaaatatattcctgcatcatttgttcatggtaaccaggaaattgcaatgcataaatacatgctgtcatttccaaagcggctctcttccagaattggtactgattctagtagacttttcattctgatgttaaaaatataattaatagaaatgtcttgtacctaatagcttttttccccacaactccccaaccccctcactctagaggccttagtagtctaatttaatcagcttagtctgaaatataatactaccttggcatcttgttggcctagtatttcttactcttttatggaatgaactgtgcaattgttttgtgtggctaaaaggtattctaggtcgagtatagtggctcacacctgtaatcccagcgctttgggatgccgaggtgggcggatcacctgaggtcgggagttcgagaccagcctggccaacatgttgaaaacccgtctctactaaaaatacaaaatttagccaggtgaggtggtgtgcatctgtcatcgcagatactcaggaggcagaggcacgacaattgcttgaacccaggaggcagaggttacggtgagctaagattgcatcactgcactccagtctgggcaacagagtgagaccctgtctcaaaaaataaaaaacaaaataaataaataaaaaataaaaggcattctaattaagttgttgcttttttttttttttttaattccagagcggactgatgtactggcccttagtacaggtgagttccgcctgctcagtaatatgaactcagggctttggtttccatgtggccctaatggactcactctccctgttccagctaaccaacttcagccttgttcctgttcaatggagaacagcttacgctggagtctgtggttttctctgggccaccttcatctgtttttcccagcagagcggtgacggcacattcaagtcagctttcaccattttatatacaaaggggaccagtgccacagaagggtccccggagaaatgagaagtcaaggactctcttaaagggaccacattttgacctaaaatgcacagaattgcctgcagacaaaatatttgatgtgccaattatgcacttcattttgaggaattactactatttatagacccacttttaaaaaaattatcaatgattattttttaattgtattcagacattttttcctgatctagtctgaaatattacttctctaatattttggttaatatgaataacagtggcaaaatggcattttagaattattaatatttctaatattttaatgcaagtttcaggaaacttggtttcttggttttgattgtttacatttctattctaaaatctcaggttatctcctgaacacttttggacagatgaagttttacaccaaaaaatagttcttagagtgaattttaatttacatagaactcaatcgaaatgaagatttaataaccagatttctttccccaaaacatacataatttgttattttgatactaaaatttagtaaatacctttttttttttttttttgagatggagtctggctctgtcacccaggctggagtgcagtggtgccatcttggctctctgcaacctctgcctcctgggttcaagcgattctcctgcctcagcctcccaagtagctaggactacagtcgcccagcaccacgcccagctaactggtggtggtagagacagggttttaccatgttggccaggctggtctccagctcctgacctcgtgatccgccctcctcagcctccgaaagtgctgggattacagcagtcagccactgcgtcctgcccccaaatttgctttgcatggagaaaactctaacaagtcctcttgaacacagttttctgataacccagatcaatgaactacccaggcttcaccactatgcgatataggcatgtgagaaactcgtacttataccccctcaatacattaaaactaaatatatatatatatatatttttaaatcaatgggccaggtgcagtggctcacgcctgtaatctcagcactttgggaggccaaggcgggtggatcacttgcggtcaggagttccagatcagcctggccagcccgcctctactaaaaatacaaaaattagccaggcgtggtggtgcatgtctcccaccacggctgggaggtgtgcccaacagctcattgagaacgggccatgatgacagtggcggttttgtggaatagaaaggggggaaaggtggggaaaagattgagaaatcggatggttgccgtgtctgtgtagaaggaagtagacatgggagacttttcattttgttctgtagtaagaaaaattcttctgccttgggatcctgttgatctgtgaccttaccctccctccactattgtcctatgaccctgccaaatccacctctgcgagaaacacccaagaatgatcaataaaaaaaaaaaagagttctggagatcagtaaaaaaaaaaaagaaacagggtttctccatgttggtcaggctggtctggaactcctgacttcaggtgatctgcccactttggcctcccaaagtgctgggattacaggcatgagccactgtgcctggccccaaatgtgttttacattttcttcctatttgattcatctttgtcctgcaacataaatatgctacttttctaccgataaaaagacaaaatggaatttaaatctggcctggacttctcaaaaaagtcagtgtgatgaaaacatgttctagataaaacagaaatgagactgggcatggtggctcatgcctggaatcccagcgccttcggaggccaaggcaggagaatcacttgaggccaggagtttgtgaacagcctgggcaacatagtgagaccccagatctactaaaaatttaaaaattagctgggcatggtggtgcatgcccatatgtctggaggctgaggcaggaggatcgcttgagcccaggatttggaggctgcagtgagctatgattgtgccactgcactccagtgtgggtgacagagtgagaccctgtctctaaaaaaaaaaaagagagacaagatgatcaggatgagcgcagtggctcacgcctataatcccagcactttgggaggccaaaccaggtggatcatatgaggtcaggagttcgagaccagcctggcctagatggtgaaaccccgtttctactaaaaatacaaaaatcagctgggtgtggtggcgcacacctgtgatcccagctactcgggaggctgaggcgggacaattgcttgaacctgggaggcagaagttgctgtgagcaagattacaccactgtgctccagcctgggcaacaggaatgagactctgtctcaaaaaaaaaaaaaggggggatgatcaaacacaatgcatcaacctcccggagccatataaaccctaaccctaacccaggaagcaggcaagcctgtgtgtgagtttccactctattgctggtaccactcggctctggcaacccggaaggccaccttcccctgttgttactgtgtaaggaggaaggagcactggtttgcaagtcagaagcctgggttgaagcctctgctcgggttcctgctggctgtgggaatgtggggttacctttcctggctggcctcgtttccttcatgtccaatgcaggggttccagtcacatgcattgggcaccattacatgtccaagctgtgccaggatctagaaaaatggctggactcaggccaaggggccttcctgtctggcagtgaaaataagaggagataccaagggccctgagtctggaggggaagtcatgagcacagggcagtgccagggcccgggagctgccacagaggagcccaccttggtgacagacacctgtaggcacatccgtgatgcccagtgcccaacacagggaactggacaaacgtttcatgcacgactcttttttcccttcttggctaccttgaggaccttgattataatagttatcctttttttctttttctttttttgagactcttgctctgtcgtccaggttggaatgcagtggcaaaatcttggctcactgcaatcttcacctctcaggttcaagtgactctccttcctcagcctccctagtagctgggattaccggtgtgcaccactaggctcagctaatttttgtatttttactacagatggggtttcaccatgttggccaggctgatcttgaactgctgacctcaggtgatctgcccacctgggcctcccaaagtcttgggattacaggtgtgagccactgagcccagccggattataatagccttttcatgcaccaggggctttatactcattatctcatttcattcatatgagttgaagtcagcttaccccccatttcacagatgaggaaaccaaggcccagagaggttaggaattcgtccaaggtcacacagctaggaagtaggattcaaacccagacagccaggctgtaacacctaggctcttctcaggctcatgcccttcccaggggtctgggaagccctgacctgcagcctgtcaccttcgtttaccccccagcctccaggatattatgtgtgcaccggcgtgggatcctggaactggcaggaattgtgggttgtgttagtccctagactcccatcgcctatatgaaatatggttccttttgtggcttgggaggccatggccagccctgcgatgccattgactggtgagtgcatgcctgggaccaggctacaaaatccctcacactctggggtagtcaaggcttatgaggaagtacccaaaactgaagctggggtttggtccagggagatcccagtgtgcagtactactttgcaggcaggcagaggcctcttggataacatggccagtgaagccagatcttggtaccagctgccccttaccctggccatgggctgaaaacgttgccttaaaaaattggccaggagcggtggctaactcctgtaatcccagcactttgggaggccgaggtgggcagatcacttgaggtcaggagttcaagaccagcctggccaatatggtgaaaccccatctctactaaaaatgcaaaaattagctgtgtgtggtggcaggcgtctgtaatctcagctactggggagactgaggcaggagaattgcttgaacccgggaggtggagtttgcagtgagttgagattgcaccgctgtattccaacctggacaacagtgccaaaccctgtctcaaaagaaaaaaataataataatataaagtggccaggtgtgttgactcatgcctgtaatcccaccactttgggtcgaggcaggaggatcactggagcccaggagtttgaaacgagcctaggcaacagagtgagaccctgtctctatattaaacacacacacacacacacacacacacacacacacacacacacacacacacacacacacacacacaaaggcagccagactatgcactaggaactgccctgggaatctctttgtgttctcacaacaatcccatttcacagatgaagaaacctaggcacagaaatattcagtaacgtgtccaggtgcggtggctcacgcctgtaatcccagtactttgggaggctgaggcaggcagatcatgaggtcaggagttcgagaccatcctggccaacatggtgaaaccccgtctctactaaaaatacaaaaattagctgtgtgtggtggcaggtgcctgtaattccagctactcaggaagctgaggcaggagaattgcttgaacccgggaggcagaggttgcaatgaaccgagatcacaccactgcactccagcctgggtgacagagcaaaactccgtctgaaaaaaaaaaaaaaaaaaaaagaaatattaagtaacttgtctgaggccacttagttaccaagacgtgggagctgggacttgaacccaggcagtctggctggattcatgcctgcagcctctgcactcctgctacttactgtgtgagaagcgcctgttctgtggaaggttgtgggctgagatctttccatgagttccactcatttacccccaaggctgttcttaaagacgggcatgacagttatgcccattttacagatggggccctgaggctcacaggggcatgccactcacccatttccacaaagctatagttagttagcagagggcagaattcggccgcctctcccctagcttgaaggctgtgattgacacagaggtttttttgttgttgctgttgtttgttcctttttcttttttttgagacagggtcttgctctgtcatcccagctggagtgcagtggtgcgatgtcagctcactgcaaactctgcctccaagatgcaaatgattctcgtgcctcagcctcccaagtagctggaattacaggtgtgcactaccacgcccagctgttttttgtagagatggggttagtagagatttgttttatagagacggggtttcaccatggtctctactaaaccctgtctctactaaaaatacaaaaattacccaggcgtggtggcacatgcctgtagtcccagctactcaagaggctgaggcaggagaatcacttgaacctgggaggtggaggttgcagtgacccaaaatcatgcactctagcctggggtctcgcttttgcccaggttagagtgcagtggcacaatcatagtggctcactgcagcctcaaactcctgggctgaagggaatcctcccacgtcagcctcccaagtagctaggactataggcatgtgccatcatggcgagttaattttttgtgtgtttttattgtcttgagacagagtcttgctctgttgctcaggctggactgcagtggcatgatcttggctcaccgcaacctccacctcctgggttcaagcaattctcctacctcagcctcccgagtagctgggattacatgtgtgtgccaccatgcctggctaattttgtatttttagtagagacagggtttcgccatgttggtcaggctgctctcgaactcctgacctcgtgatccacctgcctcggcctctcaaagtgttgggattacaggcatgagccactgagcctggcctggtgagctaatttttaaatttgttatagagacaagagtctctcttatgttgcccaggctggtctcgaccccctggcctcaagtgatcctcccacctcagcctcccaaagtgctgggattacagatgggtgtcaccgcacctggcctccgaggaggatttcattataaacctgccctgaagggagggaatccaattttacgagagggtgtagcctggtgaggcctggatgacctccggaggcaggggcttgtgcctgggctgaggcctaagggacaatgggcagacatgaagttgccccaggcagagggtacagtgtgggcaaagtcaggaagtggcagggcttggatcactccaggaagagagaggagtcatgtgtcacaggagctcgagacccagagagtgaggcaggcaggcagggaccaagcttgggcacagccaggaaggcaggacagggcatggtggggccaatggaatcattacccaagacgggcattttcagggaaacagcttagataaggccaggcgtacagtagctcccacctgtaatcccagcatttggggaggctgaggtaggaggactgcttgagcctgggagttcaagaccagcctaggcaacatagaccccatatccacaaaaaatttaaaaaaggagtttgtgttcctgtagtagcatacttgggaagttgaggtggcagtatcacttgagcccgggagttcaaggctaaagtgagctgattgagccattgcaccccagcctgagcgacagagagatatgctgtctcaaaggaaatacaaattaaaaaaccagccgggcatgctggcgtgtgcctgtagtctcagctacttgggacactgaagtgggaggatcgcttgagcccaggagttcaaggctgccgtgagctatgattgtgcctctgcagtccagcctgggcgactgcagactgcaggacttttttaaagaccctgtctcttaaaaaaaaaaaaatcttagataagaggatgctgtgcctccctgggggtcttcagtcacccatggtcctggcaagagaggagggccaggagagagcttcacccacctgctgtcctgcccgtgtgacatccgcaggtgctgccatggccacgactgttgttacactcgagctgaggaggccggctgcagccccaagacagagcgctactcctggcagtgcgtcaatcagagcgtcctgtgcgatgagtccccagcagcaccatgccacccaccccgagtatcccctgggcaccctggcatagccagatgacttccgtgcccctgttgcaataaccactgcttccaagtctctgtagaccaccccttgggtatatctaatgtaagtgatatttattttatttatattttttgagtcagagtctcactctgtcacccaggctagagtgtgctgacgtgatcttggctcactacaacctctgcctcctgggttcaagcgattctcatgcctcagcctcccaagtggctaggactacagacatgcaccatcacgcccagctaatttttgtatttttttcagtagaggtggggtttcaccaagttggccgggctggtctcaaactccccacctcaagtgctctgcccgcctcggcctcccaaagtgctgggattacaggcatgagccatggtgtctggccctaatgtgagtgatctttaacactgagcacttgaaaaagaaaaccctgaagaaacctaattattcgatgtctggacgacaaggaagaagatagaaatggcatcagataataaacagtgtaaatgtttgtttatcagaaaggggctggtggtcgggacaagtaggaggatcgcttgagtccaggagtgcatctctacaaaaaagttaaaggattttttaacattggccaggcgtggtggcacacatctgtgatcccagctacttgggaggctgaggcaggaggattgcttgaagcccaggaggttgaggctgcagtgagctgtgatcgagccactgcactccagcctgggtgacacagcaaaatccagtctcaaaaaaaataataataatattttacataaccaaccacttctaaagattaaaaaaaaacccctatgattaaaaacctcaggtccctcaggcaatcataccagatatcgaaacaaagcaataacataaggactgcagtatttattttatttttatattatttatttattctttgttagtttttggagtgtgggttttgttttgttttttgaattttttattttgttctactcggttttattcttattgctcaggcttgagtgcactggcctcttctcagctcaacctccgcctcttgggttcgggtaatgatggttccacgtcagcggccctccgcctcttgggtttgcgtgacggttccacgtcaccgaccctccgcctcttgggttcgggtgatgatggttccacgtcagcggccctccgcctcttgggtttgcgtgacggttccacatcaccgaccctccgcctcttgggttcgggtgatgatggttccacgtcagcggccctccgcctcttgggtttgcgtgacggttccacgtcaccgaccctccgcctcttgggttcgggaggtggttccatctcagccgccctctgcctcttgggtttgcgtggtttttctgcctcagcctcctgagtagctaagggaggtgtcttgagattatcatcggctgagggtggaagcggcccccgcagacgctcggcaggtgtcttgatattatcatctgctgagggtggagctgagggtggaaggggagtgagctgacgctcagaaggtgtcttgagattatcatccgctgagggtggaagcggcccccgcagacgctcggcaggtgtcttgatattatcatctgctgagggtggagctgagggtggaaggggagtgagctgacgctcggaaggtgtcttgagattatcatccgctgagggtggaagcggcccccgcagacgctcggcaggtgtcttgatattatcatctgctgagggtggagctgagggtggaaggggagtgagctgacgctcggaaggtgtcttgagattatcatccgctgagggtggaagcggcccccgcagacgctccccgcagacgctcggcaggtgtcttgatattatcatctgctgagggtggagctgagggtggaaggggagtgagctgacgctcggaaggtgtcttgagattatcatccgctgagggtggaagcggcccccgcagacgctcggcaggtgtcttgatattatcatctgctgagggtggagctgagggtggaaggggagtgagctgacgctcggaaggtgtcttgagattatcatccgctgagggtggaagcggcccccgcagacgctcggcaggtgtcttgatattatcatctgctgagggtggagctgagggtggaaggggagtgagctgacgctcggaaggtgtcttgagattatcatccgctgagggtggaagcggcccccgcagacgctcggcaggtgtcttgatattatcatctgctgagggtggagctgagggtggaaggggagtgagctgacgctcggaaggtgtcttgagattatcatcggctgatggtggaagcggaatccgcagacgctcagcaggtatcttgatattatcatctgctgagagtggagctgagggtggaaggggagtgagctgacgctcggaaggtgtcttgagattatcatccgctgagggtggaaggcaggtgtcttgatattatcatctgctgagggtggagctgagggtggaaggggagtgagctgacgctcggaaggtgtcttgagattatcatccgctgagggtggaagcggcccccgcagacgctcggcaggtgtcttgatattatcatctgctgagggtggagctgagggtggaaggggagtgagctgacgctcggaaggtgtcttgagattatcatccgctgagggtggaaggggatggagcagacactcggcacgtgtcttgagattatcatccgctgagggtggagctgagggtggagctgagggtggaaggggagtgagcagacactcgggaggtgtcttgagattatcatccgctgagggtggaaggggagtgagcagacactcgggaggtgtcttgagattatcatccgctgagggtggaaggggagtgagcagacactcaggaggtgtcttgagattatcatccgctgagggtggaaggggagtgagcacacactcgggaggtgtcttgagattatcatccgctgagggtggaaggggagtgagcacacactcgggaggtgtcttgaggctcagggagttatcagttatagaatgttgttgagttggaggaggtggctggtggcccatcctgttttttaaagtttcagctgtgaggtagggccagtagggcaatcctgaagaatgacgatgctccgctgccgccattctgacctgtagggccaaaggagggaatgttttcacacatattcatttgatggacaaaattaccgccaccaacacagtctgcaccttctgttgctggtgatagatttttgcacctttccatcctccaggtttcaaaatagcagtatcagtgtcataatatcacccttccactgagtactgccgacagctggagggtaaaggaaagtcattgggacacactgttgtctccacatgccactgtgtctgtctgcaaatgtaggcaggctggggtcctgccccagggaagacagagtcataacagagtaataaagaagcatgtttgagacacaggagtgtctatgtctatcctcattcctccctcacagccatcaccagagcatgtttcttgcaccaggtcaacagacagtaagagacagtaagagaggcatgaaaagcccactgtccacacatgttgcagcttctttttggagaatgttttccaggccttttatgttctgtctctgactctcagaactctgcaaggtcagtgtgaccaccctgctccaaatctaagaaaacagaggtttccagaggaaggagaaattgtgcccagggtcacacagcttgcaagaggcagagtggaagttgattccagctctgcctgcaggaccctctcatttcccctctgtttcccttcttgacaaaggatcttcttcactctggaggtgccacccatgagaacaaagagctctggagagatgtggattcctgaagagctgcaggggaactgggagagggttttctgacagaacaatctcacctcaagaagtcacttaggcatggctgtaatatttcttttcactcccaggtaataccaaattgtaagtgcactaggacataaagaatacttttgtccatggaaaaatgaggtgggaattctaaacaaagcaagttttaaaactgtgtttcacttcaagtgtacaagtcccatcacgtgtaatcataggactcggcagcttttgaaggtacagaggccacacaagaaccagcttagctgagcatcatttaaggccttcatttggaattgtccctgtgggtaataagttacattcactcttcactagtttacagtcagggcccatctgctattacaaatacggaacctctgacacttagaatattagatcaggggccccactgggtggggatgaaggtgtttttgcacaacacggttaccaacagggatgggactgtgatgcttgtaggcagcctttctctctgccatctccctctgcagggcttgagcacagagctgtagggagaaaaatgtatccatgtcctgacctggcagactatgtccaaaagcaaggaaaacaagcaaacttacccagttgcaaagagcctttcttgcagaaggggggatctgaaaaagccaacacatgagaaattgaatgttgagagagtctaagggccgtggcatcatctgcatcagcactgaactatcctgcaactgcagggaggaagctccttactttgcatttgtggtagtcctctgcccgccgccgcaactcttgcgcacgttgaaacattttcctatggattacaatcactttcatcagataaagcaccactttcaggatgattttaaataatctgccatgtttctgttatcctcacaactgtacccttacacaatctatctctacctagaaaacgtatttcagatggctataagagtacagtctgagccggtcacggtggctgacgcctgtaatcccagcactctgggagggcggggcagatggatcacgaggtcaggagattgagaccattgtggctaatatggtgaaaccccttctctactaaaaatacaaaaaattagccaggcgtggtggcaggcacctgtaatcccagctactcgggaggctgaggcaggggaatcacttgaacctgggaggcggaggttgcagtgagccaagatcacgtcattgcactccagcctgggtgacacagcgagactccatctcagaaaaacaaaaacaaaaaaactgtacagtctgatccaaactgttgctgtattgattcctcctcttgcttactgcctgctgacttctgagatgatagtttccttccccattctcagtacatccctaattcatccttcattgagcatcttttatcataaagctgtattctctttgtattaatatccttaccgtgtttcacagggcagaaacagctgggcttataaacaggcatagtccttttgaaggatgtggttgatcctacaacaacacactttcctaaggatgacaacaactcaccccacccctagaatggctggtatgaaccgagtttccacacagtctagctggcaatggggtcaggagacgttttgctacttcacatcttttggtcactggtaaatattaaggtactttgttttctgttttgtgaactctctctcgctctctctcacgatatgtcttctgaccgtttgtttctatttctgcatttactgggtctaaatactgtacaaaggttaaaaacaacactccaatgggcgtttcccaggagggtggggttcagtttctgaactcacttgtaggtgtgtatttctttcatatccaatttcccattttcctctgcctctgatacctgcctctccttttctgcatgctcacattctttcacgcttagtttcctcagattagaagggagagaaatgcacacacatgatccaccagcccgtgtgggattccctctgcccttctggcatctgaaggctgtgattcaaagatcccccctgcaaccttcccacaaatgaaccaactgattctcacaaccgaagggagaattgacacctcccattgagggacaaaaaaaagtcacactctggcctgctggcaagtcacctgtcatttccagctcatcttcatagttccatagttagtcctattctttagtaaatataaagactattaaaagcttctatgaggtgcactatgtgtgtctctggggtcagtcttgtgcttgacacagcgaaagctcattttagttcagtgtgaaaaaccagacctcaccaattcatcacaactaactccatcggaagcagaggattgctcctcatctgactcctcctgtgtgagacctgattctcagtcagaggctgatgccggaactgagaccatcagccatagagagatccttccagaataaccccgcagttcactactgcactttgccatgattcaggactggaactcttgtcatcgactttaaagatcctggttgagagaaaaggcaatctgaatgctgggcgcatctattgaattagaaatgatcggaatggctcctaagtcagggtgttatgtcctgaaaataggtgacaacggcaaaccatccaccctggtgttgactgactttaacaaggttcagttcacagagattgagggcagaaaaaggaaacggcctaaaaagggtaagtttgctgtgttgccctcactccacttgattcatggtcctgatcctaaggatctcacctgatacttggttttataggaaggatgtgtaaaattcccagaacgctaggaaacaggggcgaaaacacttcaaagagaaagttaatgaacttgtttctgaccacaaggcatccttcagcacatgctgtctggagtggcctcaaacaaggagtgtgtggtgtggtgctgagaatgcaatgggagcagggtcctgtccccacgctaaagaagctcacagcttaatgcaaatgagaagccagtgaggacatcactactcctgctgtgcacttgggaactagaaacacaaaacctgactctggagggaagctaaggaagcattctactcttgagttgacataagtgcatctgaagcttctgatctccgatgagaacaatgggggacaccaaacagaatataaaacccatgattgaatacatcaaattgctaacatggcagtaaacagacatgaggtgaagatggagaagaaggaaacccaggacgaaagtcagcctcgcatttggaacccatttccctgagtttcattgctgaattccagaaggaactactgagatgcaaagaagcacagcagcttttgcacacatgcgtgggattagatggaaaacaagtggattgagggtctgccaatgaaagcgacccgtactgaagtccactggctctggttgagacccagaagagtcatgcatcagaataaaggtggacaggaaataccctggcctttgtagggactgagcctgcaccgacgacttcaattgcagcctgtatggaggacccctgaccatcccccagaagtagactcccatctcttctgcagcaagataacatgctactaggcctcaattcattgctaaacattttttaacaagtatctcacatttaacaaaaaaagatcagtcatatggcagcaaaatacaatgtcatatgaccaaaacatgaaagactgtgaaaatgaatctggaggtgacccaagcattgaattcaacaatccaggctgggtgcggtggctcacactgggaggctgaggtaggcagatcacctgaggtcaggagttcaagactagcctggccaacatggtgaacccgtctctactaaaaatacaaaaattgggccgggcacggtggctcacgcctgtaatcccagcacattgggaggccgaggtgtgcggatcatgtcaggagttctagaccagcttggccaatatggtgaaaccccgcctctactaaaaatacaaaaattatccgggcatggtggcatatgcctgtagtcccagctactcaagaggctgagggataagaatcgcttgaacctgggaggtggaggttgcagtgagccaagatcatgccactgcactctagcctgggtgacagagtgagactctgtctcaaaaaaaaaaaaaaaaaaaaaaattggtcaaatgtggtggcacacacctgtaatccaagctactcgggaagctgaggcagaattgcttcaaactgggaggcagaggttgcagtgagccaagattgcaccatagcactccagcctgggcgacagagcgagactctatctcaaaattaaaaaaaaaaaaaaaaaaaaaaaaggctggctgtggtggctcacgcctctaataccagcactttgggaggctgaggcaggtggattacctgaggtcagaagttcgagaccagcctggacaacatggtgaaaccccatctctagtaaaaatacaaaaattagctgggcgtggtggtgggcacctgtaatcccagctacttgggaggctgacgcaggagaattgcttgaacccaaaaggcagtgagctgagattgtgccattgcactacagcctgggcaacaacagcaaagctccatctcaggaaaaaaaaaaaaaaaaaaaagagaaaggaaaaccaatgccagtactagcaactcctcttcctccgaaaaaatgaaaacaagaatgtaggaagggaaaggaattatacagcttaaactaatgaagcagaaaggacaaactcaattttgaacccactgaatttgccacaaatattgtagaaaatattctcaaggactttacagttgtctactttgattggcacatggttcatacaacagtatttgtgtcaaggcacatcttactgttttctggcggtcttcctctttccattgattttgtcatgatggttgattttcgttgtcaccttcctcttacggattttagctctaacttttgtttccacatgtctccgtagagtaatgacgtctttcaggccaattttatttcctcgaaaggaagaaactcttttctttgtgtgcatacaaatggacctcagcccttggtgagagtgaggagaggagaaggtgagaaacctgagggcaagaagctgttctttccctttccagggcaaactcatttccacactatgcggattccaacagagccataccttcctgtctacggcggttggacctccaggctctctgctgtacatccgtggatccatcatgtccatttcgagaccagaagatagtcttcaggagagacacctaggaaataataatataagaatgacggctgggcacggtggctcatgcgtataatcccagtacttcgggaggccgaggcaggtggatcacggggtcaggagttcaagaccagcctggccaagatggtgaaaccccgtctctactaaaaatacaaaaattagccgggcatggcagcgggcgcctgtaatccaagctactcgggaggctgaggcagagaaccgtttgaagctgggaggcggaggttgcactgagccgagatcacaccactgcactccagcctgagcgacagaatgagactctgtcacatacacacacacacacacaagaatgacatgaggctggcacggtggctcactcctgtaatcccagcactttgggaggccgaggcaggcggatcacctgaggtcgggagtttgagaccagcctcaccaacatggagaaacgctgtctctgctaaaaatacaaaattagccaggcatggtggtgcatgcctgtaatcccagctagtcgggaggctgaggcaggagaatcacttgaacccagcaggaaaagcttgtggtgagctgagattgtgccattgcactccaacctgggcaacaaaattgaaactcttgtctcaaaaaaaaaaaaaaaaaaaaaggccagatgcggtagctcacgcctgtaatcccagcactttgggaggccgaggcgggtgaatcacaaggtcaagagatggagaccatcctgggcaacatggtgaaaccccgtctctactaaaaatacaaaaattagctgagcatggtgatgcacgcctgtagtcccagctactcgggaggctgaggcaggagaactgcttgaacccaggaggcagaggttgcagtgagccaagatcccaccactgcactccagcctggtgacagagtgagactccgtctcaaaaaaaaaaaaaaaaaaaatgacatgaatatacttcacacaactgaactgtacacttcaacacggttagatggtaattatcatcttataagtattttaccacaggttaacatgtttcacaacttgaaaaggaagtaattaccttcagctctctgagttctagaatttgtaacatttcatcccctgctccttcctgatctgcactggagcatcttccttctgtccctgctctactcagagttcactttcccttccctcacatcagcttcattgaggctggtttgaacttaacgcaaaacattctcactaatgactgaattcccaccaagatttccatattatcacagtatgcttttaatcttctaagatattaaatatttcttctcatcatagctaaaatgcaatgcaaatcccatctcagatgtgggtcagatacctatgaatctcctgaggtggtcattgaaatgactttttcttgagacagagtgtcactctcaaccatgctgaagtgcagtggcgctaccttggctcacggcaacctccacctcccagattcaagcgattcttgtgcctcagcctcccaagtagctgggattacaggtgcctgctaccatgcctggctaatttttgtctttttagtagagatggggtttcaccatgttggcccatctggtcttgaactcctgacctcaaatgatccatctgcttcagcctcccaaagtgctgggattacaggcatgagccaccacacctggcctgaaataatatctttcaaattctttgtagaatttgttttttcctgatttctgcacataggataaaaaaaaaatcatgtactaggatttcgagagaagcaatgggtaatctaaaaagatgaaaagagcaaccacgtcaatcccacagctactgctagatttcataggaaaggtagctggcccagtttggagctaggggaaatgtcaaacacatgaagaaatgagaagccaagaaatgccatcacgcatgaatgcttcatggcacccatgatgtccctgcttaggaggtaatggtatagatgactagatgacaaggacaaagatgagaggtgcgaagttgtccaagtccaacagctcaactgaactttcctaagtggaattgttaaaaagtggtaaatttaaaaacttcccctggctcacgtggtggctcacgcttgtaatcccagcactttgggaggctgaggcgggtggatcatttgaggtcgggttttgagactagcctggccaacatggtaaaaccccgactctactaaaaatacaaaaattagctgggcatggtggtgggcacctgtaatcccagctacttgagaggctgaggcaggggaatcacttgaagccaggaggtggaggttgcagtgagccgaggtcacaccattatactccagcctgggcaacagaaggagactcgtcttcggggtgagaaaagaaaaaaaaaaaagaaaaaagcttcctccaatttataccgaaaattctctgttcaggactaagtggcatagagaatgttaaatgtgcctagatatcttcataactcatatattttctgttttctacatatcttgaaaggcagtgccaaatgacgtgtaattatctaggtggtaaaactgaaacatacttcctcttcccttgaatataaaaaagcattgtggtattagtacttttatcttggatcattgttcagaaggaggttcagcccccagacaaccacatttttactgtcatgaatggcaagacaaaatgtagagctcaacttacccaaaggaaaaaaggctcaaaagacaaattatggcacaacttagcagccaaattcttaccaagtacagacttttgacatactgatctctctccagttccaagtcggaacatgcactttgaatgatgtcattcaaaattaccctgcccagacacacttttcattgattctcttggagggcagttctaagagtctctggggctttctctgcatcatgagacgcagtgcagttctgcccttcaccttccggcagtttgtcacctcgtccctatgacctcacaggaactttgtctcaggccaattgtttgttccttggcctctttcatttcccctaaaaatcatttgctgcccctctaaatggcctacatctccatctatctccctctcccctcagaagagggtgctctttaagcatcagccatccggcccttctagcagtctcatttttcagctggttcccatgtttatgcctgttctatgtttttcttttcctgttaagctgtctgttgtcagctcatttctgcagtgaatcttcagagaagagattggaagctttccttccacccatacgatagaactacaaagcagaagagtttagaaagaatttcctatttaagtgacgaaacctcatactccatttgtgataaatagcacaaaggttaaaaaaacttatttttgaccaaaagctctgttgacattctattaaacaaacaccgacctatttaattttcataatgcaaatggcagatgttttcataattcttatactaataaatcatttccctgattttttgggtaaaaccacatattcataatgaagtccagaaatgtgaattgttttatataatttattcttatttgtgattacaagtatacctctacagaaagttagtatactcacccaaaggtaaactatccagagggtaatgacaactttataacttgtcggaaacgcaataatgacatgtaaccaaggacttccaccaaagtcagtcccacgatgatgatggtcagccagagtattgataacctggaataataatagttgaaataatgaaaaggtcaatgacactgacaatatttcactcagaaagaatcatccttagaaaccgtcaacctcctccaaaaggtaaccacatccctcagatatcaccgtgggattccactgctacaaaaaagaacagaagttagaagtcacatgtttttcagatggctggtagtgttttcaggcattgcaaatgtggggtgttgtctttcttggtataaagcagggatatccaatcttttgacttccctgcctatattaaaagaagcaaagttgtcttgagccacacataacatacactaacactaacaatagctgatgatctaaaaaaaacctcttttttttttttgagacagagttccgctccactcagtcgcccaggctggagtgcagtggtgcaatctcggctcactgcaacctccagctcctgggctcaagccattctcctgcctcagcctcccgagtagctgagattacaggtctctgccaccatgcccgactcatttttgtatttttagtagagatgaggtttcaccatgttggccagtctggccttgaactcctgacaggcgatctgcctgcctcggcctcccaaagtgctgggattacaggtgtgagccaccgtgcccagccatttttttgtttttgtttttgtttgttatttttgagatggggtctcactctgtcacccaggctggagtgcagtggtgtgctcccggctcactgcaacctctgcctctcaggttcaagtgattctcctgcctcagcctcctgagtagctgggagtacaggtgcctgacagtgcactcagcaaatttttgtagtttttgtggagatggggttttgccatgttggtcagggtggtctcgaactcctgacctcaggtaatctgcccgcctcagcctcccaaagtgctgggattacacgcatgagccactgtacctggccaaaatctcctaatgttttaagaaagtttacaaatttgtgttgaactgcattcaaaactgtcctgggccacatgcagcccgtcactcatgggtaagacaagctaagtataaagtaattatcttatcttttcttttctttttgttttgagacaaagttttgctctgtcacccaggctagattgcagtggcatgatctcaactcactgcaacctccgcctcccgggttcaagcgattctcctgcctcagctactgagtaactgggattacaggcgcctgccaccacgctcggctaatttttgtatttttagtagaaacagggtttcaccatcttggccaggctggtctccaactcctgacctcatgatccacctgccttggcctcccaaagtgctgggaatacaggtgtgagccactgcacctggccagtagttatcttttctttaaagttatttacttgttttttaaattgatgtataacattggatgcatttattatatatcacatggtaaaagaatccctctaaataatacttctctcttggattatatgaatctttgtcatttaaatctcagcataagtaaaaaaaaaaaaaaaatacaatgaagagattacttcattcacaaataagtatcaaattttagtgcttaaaaattaacaaggtgggctgggcgtggtggctcacgcctgcaatcccagcactttgggaagccgaggtgggtggaccacgagatcaggagattgagaccatcctagctaacacggtgaaacccgtctctactaaaaatacaaaaaattagcagggcatggtggcacgtgcctatagttccagctacttgggaggctgaggcagaagaatcacttgaacccgggaggcagaggttgcagtgagccgagatcgcaccactgcacttcagcctgggtgacagagcgagactctgtctcaaaaaaaaaaaaaaaaaaattaccaaggtggagatcatgaaaatggcatgaatagtgtgggatttctctaagattgttgatattaattccattagactcttatgtgagtgaagacgaagacttcccctgagtaagttcagacagcttctgataacatttctacgtcgattcctcaggatttaactatatattcttgaaaacatctcaattttaaatgtttctttcaagatggtgaattaaacagagatagcccttcaacaggttgaactcagcatatgctgagtctgaaatggaaatgatgaagttagagaaccatacaacaatggtaatgatttcagaaacatggtgttgagcagaacaaagcagacacaaaagagtacctatggcatggcatgcatctgtatacgcgaaattccagaataagcaagctaacctatgataagaaagagactggctgggaagactgagagttcactttctggggtgacataatagtgtagatcttggctgggcacggtggttcacgcctgtaatcccaacgctttgggaggccgaggcgggcggatcacctgaggtcgggagttcaaaaccagcctgaccaacatggagaaaccctatctctactaaaaatacaaaattagctgggagtggtgccacatgtctgtaatcccagccactcgggaggctgaggcaggagaatcgctcgaacctgggaagcagaggttgcggtgagctgatattgccccattgcactccagcctgggcaacaagggagaaactgtctcaaaataaataaataaataaataaataaataaataaataaaataatgtagatcttgaaagggggttggtttatgctggtgtatgtactttccaaagttagtaaacttacacttaaggttatatattttggccaggcgcggtggctcacgcctgtaatcccagcactgggaggctgaggcaggcagatcacgaggtcaagagatggagactatcctggcgaacatggtgaaaccccgtctctactaaaaatacaaaaaattagccgggcgtagtggcgggcgcctgtagtcccagctacttgggaggctgaggcaggagaatggcgtgaacccgggaggcggagcttgcagtgagccgaggtcccgccactgcactccagcctgggcgacagagcgagactccgtctcaaaaaaaaaaaaaaaaaaaaaaaaaaaaaaaaaaaaaaattagccaggcgtggtggtctactaaaaatacaaaaattagccaggcgttgtaatctgagctactcaggaggctgaggcaggacaattgcttgaaccccagaagcggaggttgcagtgagccgagatcttgccactgcactccagcctgggcgacagagtgagactctgtctaaaaaaaaaaaaaaaaaaaaaaaaagtcatcaaaccagatgacacaaatcaaatgacatttcactttgttttggtccattttctttgttaaaaacaagagtgcagcggggccatctcggctcactgcaacgtccagctcctgggcccaagcgatcctcccacctcagcctctccagtaactgggataacaggtacgcaccaccaggcccgactaatctttattggaattttttgtagagatggggtttcgctatgatgccctggctagtcttcaactcctggactcaagtgatctgcccacctcggccctctaaagtgctgggattacaggcctgagctgtgtaatttcatgccacgtgatacagcccagtaaaaaggaagaaaccccacgggtccagcgtctactcacagagatgcactgatggctgataaattccagtaggagcccaaagaggagccaaaagagcatccaccgcacccgcatgtcctggtcctttcagggcgccctgaggcggccaggacagaggtggaggtggcttagggcaggggggagggaaggggacgggaccggggccggatctgagttggggagggggaggggagggggaggggaaggggaggggaaggggggaagtaagggaagggaaaggaggagaagggggctgttgggcacctggaggaggtggaggaggaggaggagaagaagaaaggggtctgggaaaggatccggttcaaattaagttctcaagcgctggtggaaggtttagctacaggtcacggagaagatcagggaagcaacaggacacgcggggcaagggagcgtgaggcttaggagcaatcagagggagacaaaaaggttctgctatccaccaaaccttcttcggtctgggccctcccttaccaaccctggggctttatactccctctccaccaatccctgatgaccccggtggtgcctcacaatggacagtgcctcacaatggacaatgccaagtagcgcccgcatcattccaatgacccctcccccatctcagtctcccacactcctcccaaagacaggtcctctctggaaccttcacaaacctgatttctggtcctccccaaccagctccctgtccctgcttctgggcgctccttccttcctgagctcccagggttcctcaaggtcacttatggcgacaaaacataaaaaacaaatgatggcaggatggcaggaagaacctcatacccaagcagagtgccaggttttacagcctccgctcagccattcatatcctaagcaacaaaacatcagcagggtgcggaaggtcccgatagtaaaccatctccatcacatccatgtagccatccgtccatcaacctgtatctcaggaacaaatgtagatacattcattttaagcatgcctggtacatttacaaaaattaacctgacttattttgttccagcaaatctcaatatatttgagagcaatcaaatcacacagcatgtttctgatcatataactgtgctagaagtcaatgattaaaagctaattcaaaattattatttgcttggaaattcaaagtgcccttataagacataaacataagaaagaatccaaaatgaaacaagattgcctttcaactcaatgatgagatcataacatggcaataaaatgtctccctctggcctgggaattcctctttgtggcacaaggttgtgtgatctcaaatcaccgctaacccacctagacattttaacatccgaaaccgagtgatgacgtccttatctatatcatcttactgcctgtgtgtgtggactttaaattctgaacccaaatgagggggagaaaaccaagttgactttcatgactgagctctcagggacgtccaaggaatctgtgcatttcaagaaacaaagttcatcagcttctctcctaaggtatttgcccacaatacccagagggcttggcagcatcatgtgtgatgggtggggagctccaagcaggtgggcaggacccaggggcctggtgaccaggacagacccccactgtccatcaactttcctggccctgtcctctgctaaacttcccacaggccttctgcccgatcacacagagtatgcccaaactctctcaggcctctggcagctgaaaaccactgctttaaatccctttaccatttactatgacataaggttattgtaaacaggaaatattctattgatgctacaaatggaaagccaatgcctttaccataaatagaaaaacaaccctaagaagcaagcaaaacaaaaacaaaacgggctgggtgtggtggctcacgcctgtaatcccagcactttgggaggccgaggtgggcggatcacaaggtcaggagttccagaccagcctggccaatatggtgaaaccctgtctctaataaaatacaaaaattagccgggtgtggtggtgggcgcctgtagtcccacctacttgggaggctgaggcaggagaatagtttgaacccgggaggcagagtctgcagtgagccgagattgcaccactgcactccagcctaggcgacagagcgagactctgtctcaaaaacagcaacaactacaaacaaacaaaaaacagggttaacaaaagtatggaattcaattctttttatatgctgcagccatgttcctgccctagatttggctgggcatggtggctcacgcctgtaatcccagcactttgggaggctgaggcaggcggatcacgaggttaggagttggagaccagcctgaccaacatggtgaaaccccatctctactaaaaatacaaaaattagccaggcatggtggcacacgcctgtaatcccagctactcaggaggctgaggcaggacaatcccttggacccgggaggcggaggttgcagtgagccgagattgtaccattgcactccagcctgggtgacagaatggaatgagactctgtctcaaaaaaaaaaaaaaaaaaaaagcagccctagatttcggttgtggtggttgtaaaaggagagaccaagtaagtgggggttgaagtcagattagagcaaaagtgaatggcagagagtactataatgtccatgaagggctgctagagtcaccgtgatcatagcccaagcagagatagggaaaggaagatgtgagcagagtttggggtctcgaacaatggaggttattcgtgcagcccaggaaaggctccccaaagccaggatcaacctcccttggaggcggtccctcatggaggcatggtcaggcaccttagatttgagaacagctatgttgctgctgaccagctgtgtgaccctgggctggtttccttccacacaatgggagtgccaatggctgcatgcatgcaaagaccgtctgaggataggaggaagcaatctgttgagcacccgtgtacctgagtgtcatcacctcccaagggcatccttcgttccagagctggcgccttggaaggcccttggtcactgaaggcagtgatgatggtaacagcagtaaatcatcatttacggctgatgagggaaggccaggggtagggctcctaggtcctggataagaatgagggtctgggcactcctggggacagctgagtggtaggactcctgggtccccagggggaaggtccatcttcagtggcattgggcctaggctgggatgctgagttatccactggagcatcagcagtacaggcaggcacagaggcagtggatccatcggaggtggcaggtgtaggatcgtctggtgagcaagtagagtcaccaaatctggctgaccactacccccactacccccactatccccacagacgatgccctgtcccttgcctcatgctccggcagggtacaggctcgcacctggggcctcaaggagcatctctctaagacctctgtgtcctggtcattgaatgggcacttgagtcacccagggccattggaacaaagaggaagaatcaggccccacgatgttttgggagagtgtttagcacaggaaaatgcgcagaatacatgcacgacacgggggcactgtcagtgtgggagcaatggtttacaacctccagccctaatctgagcactctcacctgtgcaatctgaaaggaacaggagacttgcaggaaagacagtgcctggatttaacttaaaggaactaaaaatgttggaatttttactcttgatatccttccaaatcaactctctcaatgttcccatcctcaaaactatcatatggggtaactgaggcagtcagagatttactgactcaatgtcactcaattgattctgagttcactgctgattacatccgaccaaactgctttttctgaagtctactccgtttaatcatgctggtgatgattttgtgcggctctgggacaaactccacctggctgaagataaagcaaatctgcggtgacttagtcctcctgtcatttcccatcagttccccactctcctcctctgcccctccacagtctcccatgcaggctgacaccatatgacggccttaatggagtccaccgagtatttcaggttctctcctgggccacttgaaagtggatgtacccatgggatttgctttgacccaggagatgtgagtggaagtgaagcgtgtcacctcgaggcaaaagagttgggagccattgagacgggccactctctccttcatctcttagagcagctgacagctcccatatggaggctgctcctttattctcgtggcaggatgagggcatgtggggcacagggcacaggagagccatggaggatgtgcagcatgggcaggaaaagagccttcagtggtgtacatttccatagtttggggctgtttcttacctacagtgatacctagcccatcctagcaggcatgcaccatctactccacactctgtgatgcagactagcctgccgtcagaacacgaactggtggtcagacacaggtaggtttcagttccagctctgcctcttattgactgcaacctcaggcttaactttcagtctctgagcctcagtttcaactctgtaaaatgaggtggctataccatctcaggttgcagagagaattaaatgaaatataagtgcatgtagagcattgaacccagggcctggcacacacagtgagtacacaatgttagccaggtagcttcataatgcatactgattgttaatattcagacaatgcagtaaagtgttaccaaaaataaaagtaaacttatttgcatatgtattctttcaatctttatttttaaacagggtaaaactatgcatattctttcatagccagtgtttttctcttcatagtatattgttaaaataattttacttggaccgggtgcagcggctcacacctaaagtcccagcactttgggaggccgcggtgggcagatcacgaggtcaggagttgacacgagcctggccaatatggtgaaaccccatctctactaagaatacaaaaattagctgggcatggtggcacacacctgtagtcccagctactcagaggctgaggcagaggaattgcttgaacccgggagacggaggttgcagtgagccaagattgtgccattgcactccagcctgggggacagagtgaaactctgtctcaaaaaatatatgtgtgtgtgtgtgtgtgtgtgtgtgtgtgtgtgtgtgtgtgtatctatataaatctcaaaaataaaagatcatttttgagattatcattttaaaagacaagataatgttcaacttaatgactaatttaattattactattggactttttgtagactaaacagagcattcaaaacaaatgaaggagaataaaaaatatgtattacatgttgtaaaataaatgtgatgtggttaactcttttattcaaagttatagaacatatatatgtactatagaatgtatttcttattatgagtcatgttaaaaagtagtttagaagctgttgatttgaatttccttttcaaattttgcaggataatttttttttttttttgacagagtctcgctctgtcgcacagtctggagtgcaatggcgtgatctcggcccactaaaacccccacctcctgaatctaagcaattctcctgtctcagcctcctgagtagctgggactacaggctcacaccaccatgcccggctaatttttgtatttttagtagggacgaggttttgccatattggtcaggctggtctcgaagtcctggcctcaggtgatccaccagcctcagcctcccaaaatgctgggattacaggcatgagtcaccatgcccagcctaaacttggcaagataataaataacctttttaagtgtcgttgggcacttgtctggttgtttttctttaggttaccatgccagcaatgattccttttgagtttctgacagaagatagtggttttcatccaaataagtcaactactctaccccatccctaagccacttgtatggaaagaaaaagaggaagaagccagtactgtgactgcgtaagcttcccccagcatcacccgctatgagatgtgtggcagctgagacccgggaactgctcaagggcaccaggccccatctgtctgcactcactcaccttcctcaggtactcgcatgggcatgtcactgactttacatgctgctgcagctccttggtgagctggccctggtcatgggacaggaactgtggggtcaggacaatagagagcttcaccatttgcagaatgagaacaggggctcatgatgagtgccaacctattagataattttaaaaaaaaagtgttgaatgagtggaaaaacaaggtgatgtttgagtctatagtggtcaagggcttcagaaaaggacagaaccaagttcaaattcctgtactttgaatttctacttcatgccatgcaaaattactttaccccttttaacctcagttttcttctgtgtgaaacaggaacaatagtttcattcgtcattcagtttctctcaaggtttcacgagatcatacctataaaacatccaagtcatttaaatgtatcatcatttctgtcataattagtgggatccatttcactattattggatatacagttctgtgcctgaaacctacaaaaaaagaaaatgttaagtctaaaaagcattagtgatttctcatttttatattactaattataaccctatttaatcacacaaggccttgtccgtggcaggtgctcaataaacacttgtcgaatcaatgcatgtgggctccggagccacactgtttagattctattctgcctccaccacttatcagctgtgtgatctgggtaagataattcacctctttatgtctgcacttccctctccataaactatatataatgagaatccttagctcattcggttgtggtgaggggtgaatgatttggcacacaggaggggcttgttaacattagctgtgatgatctccttccaaatcttcattttcagagccacagatgaggccacagtgcaaccaggtgaccttagagtgtaagtacacgatcgccagctatgctctatctccaccataggtccaagactgggtagttctggcctggaggtttctgctacatctgccttctcagtgttcacctaaggacttttgtattttcctcctcgcatccccacagatggggttcaggctgccggacacagctgggtgatgccagggcagtggtcacctgtgccagccccgtgaggtagctggaggatcattgttccttccttctcgggctctgggcagatgccagggctggggtgacccatgccctcaagtttcttgctttggtgggccacattttcccttggcaaagagggtaaaggtcacaggatgccagagagctgtgacttctctgtgccctgggcccaaactatgaagacctgacacactatgctaaaagtccaaggctgggtgctccccagagcttcttgcctcaccgcttctgctgagggaggaatgaatactatgtcctcccagagctttgggagcttgtagcaagcagcctccccagcgcaaaatctcttggaaacctctaactgtgtctgaaacattagtgcaaatgttgcatcctatttcccatatgtccgcatgttttagaaaaaaatcctcaatttcctaaatatgcaagaaaaatcggtattgtaggacaatgtgactttttaaaaaatgttatttaaaaatcttccccacctccttttctgccctccaagactgccaaatacttgttgaacatatattattaaatgcctactacatgccagccatgattcatggtcttggggacacagcagagaacgaactgacaggattcctctcttatgtaactcacattcttatatgataatgataagggttaacattaattaagctgtcactgcatgttagtcacggtgcagtcattcccacacattattacacttaaacctgccagcaagcttgcaaggtagttgtttttcctttaaaaactgagtctcggaatgatgaagcactctgtccaatgtcacacagctagtaagtgtggagaccttgcatccaatcaatgcccgtctcattctaaaggccatgttatgtgttctccagcccatggagaataattttaacacagtcaatgaaatttctacacaacaatgttcttgtctcaagtccaagaatgcctcctacacctcctataatactggctttctggtgagtaaagatgccattctcatgtgtaatcaggtggcaaatggagatatgaccaaagtaaccatctgcctacactcataaccctgtacacactcttcctgtgtcgattcaattcaagtaccccttttgatcacttagcaaatctgacctttaaaagggttagggtttttatatccatgtaagtttctgtattgctttggaagtctctggttaaattaatactcttttaatagtgacctgtgattctgttttgatcaagtgttttcaaacttgacgtctttgatgggtttctccagtgtcaaaatcctaaatcaagtctttttggcttaaaactaactttgggatttttttcagctgcatcccttggggagtctaaagaatgtatctctcatcttgtagaggtattaagtgattcgatttatttggtagattaaatgggcaggcattgtcaaatgtggcgatactgcatgggagggcactgtcaagtgaggtgacattagatctcatctcagttatatttatgggtatgttgttgatatgcgtgttccaaaaattgcatacatttatacaaatttaatatgatttgtaattttgatagttatgctaaatatttgctaaagttatatttgtataaacatgtcacgaatggctgggcaccgtcactcatgcctgtaatcccagcactttgggagacaaaggcacgtggatcacctgaggtcgggagttccagaccagcctaatagagtgaaaccctgtctccactaaaaatacaaaaattagccatgcctggtggcacatgcctgtaatctcagctactcgggaggctgagacaggagaactgcttgaacccaggatgcggaggttgtagtgagccgagatcatgccactgcactcccgcctgggtgacaaaggtagaatctatccaaaaaaaaaaaaaaaaaagttattatttctgaagattgtatgaaattcataaaagtctgctggccctgatatgatgctgtcagtcatgattctgattactgtcttaaaatgctgcacataagtaattaaatttccttgtgaactgggaagtttcatcagacttttatcataactattgtttccatcatccacagttactgttttgaattcttctctaaaaatatttgtaattggcaatagtccaaattttcttttgttttctttcctgtttttgagacacagtctggctctgtcgcctaagctggagtgcagtggtgggatctcggctcactgcaaactctgcctcccgggttcacgccattctcctgcctcagccacccaagtagctgggactacaagtgctgccaccacatccagctaattttttgtatttttagtagagacagggtttcactgtgttagccaggatggtctcaatctcctgatctcgtgatctccgcgcctcggcctcccaaagtgctgggattacaggtgtgagccaccgtgcccagcctaatttttgcatttttagtagagaggaggtttcaccatgttggccagggtggtctcaatctcctgaccttgtaatccgcctgcctcagcctcccaaagtgctgggattacaggcgtgagccactgcaactgactttttttttttttttttttttttttttgagacagagactcactctgtcacccaggctggagtgcagtggcatgattttggctcactgcaacctccacctcctgagttcaaacaattatcctgcctcatccttcggagtacctgggattacaggtgcgtgccaccgtgcccggctcatttttgtattcttagtagagacggcatttcaccatgttggccaggctggtctcaaactcctggcctcaactgatccactctcattggccttccaaggtgctgggattataggcgtgagccaccacaactggctcagtaaatacattttttattatcaaaaaagagtagtgtatggttggcgtattctgtgtagaatgtattttattgatgtctcctatttttataatttctgagttaagtactttttaattaatgctttttagttttgggcagattcagttgactaaagcacctcatttcccagatacatgaaataaaatatttggcttcttttccaatttcacactgatgttattttgtgaaaatcagtgctttaagataaatcgttatacgttaagataaacatgagaaacttgatctaatatttaatatttattcagttctacactttattaacttctacaccagcagatttagacattatgtaaccatctcaagaagtttcacttggatgtaatgcttcacgcttgtaatcccagcactttaggaggctgaggtgggaggactgcttaaggcaaggagtctgagaccagcctgggcaatacagcaagatcccatctctattttaaagaaaagtttcactttgggaggccaaggcgggtggatcacaaggtcaggagatcgagaccatcctggctaacatagtaaaaccccatctctactaaaaatataaaaaattagctgggcgtggcggtgggcgcctgtagtcccagctactcgggaggctgaggcagaagaatggcgtgaacccgggaggcagagcttgcagtgagctgagattgcgccactgcactccagcctgggcgacagagtgacactccatctcaaaaaaaaaaaaaaaaaaagtttcggcaaattccatctaagaattccaccagagttctgttgtctccaatgtcatcttccacagatttcaagttgtgaagccctgaactgttaatttatcttgagaatgtatatttaagcttaatttaagactatatacctaaaaattgagcatataatttctataatttgtttatgtaaatttctgtaagtcataagtatgtggtttccaagtgtataatttatctgaatgtaataggcattaatatattttacattactgggaccatagtacagaaatttctaaatggtttgtaaaataacttgttatttgtgttgttgtaaaagcagttaatacaatggaaaaactcgtaataagaagatacagtttaacatcaaaaagtttacccaaggtaattatgagtactacctggcaaaacttcacggaagctgtggtatcacttttatgatggaagaatggtgtttgcattttgtgtaaaagtacttgcggctgggcgtggtggctcatgtcccagtgctttgggaggcgaaggcaggtggatcatctgagcccaggagtttgagaccagcctaggcaacgtggcaagagcctgtctctccaaaacctacaaaatttagccaagcttggtggtgtgagcctgtagtcccagctacttgggagactcacgctggaggatctctcgagcccaggaggcagaagatgaataaataaatggaagcaactgaatgggatgaggtctctcttgaaggagagagcaaaagagatttaaatagtaacaattataataaggctgggcgcggtggctcacgcttgtaatcccagaactttgggaggccaaggcaggcggatcggttgaggtcaggagttcaagaccagcatggccaacacggtgaaaccctgtctctattaaaaatacaaaattagccggacatggtagtgcgtgcctgtggtctcggctactcaggtggctgagacaggagaatcgcttgaacctggtaggcacaggttgtagtgagccgataaatataaaaagtattagagtactaacagaggaaagtttccactgatcaccttttagctttaaataatgcagaagcatttgcccagtttacttgtaattaaaaatcatgcatcattcacaatttatatcttttttgtttgtacaaaaatgaacacaagttattctcttttatctgtattgtgattggtttggtgagagggaattaggccacttgagagtttgtgtgtgtttacaattttctggccaggcacggtggctcatgcctgtaatcccagcactttgggaggccaaggcgggcggatcacttgagctcaggagttcgagaccaaattgggcaacatggtgaaaccctatctctacgaaaaatacaaaaattagctgagtgccgtggcttgcgcctgtcctcccagctacttggggggctgaggcagtaggatcgctcaagcccaggaggtggaggttgcagtgagccaagatcacgtcactgcactccaggaagggcaacagagcaagactccttctaaaaaaaaaaaaaaaaaaagaaagaaagaaaagaaaattaactttggtatttcaggttgtatttaaatggagacttaacatgaactatgttcataacacttgaccaaattaagtgtagatcgtctctttaataaagagatcatctggaactgcaatttctaactcatacatcattgctacaaaccttatttgtttactatttctcttccaaggaccatcagtcatcctttaaaattcatttcaagctctgaaaagatattttttgttacatgggcaatttacttttagtacagtaaaatgttatgtgaatttctacagtatgtttgccaaaatgaattatatctagaatacgcttaacaatatattctggaggcagctttcatttgaaattaggttcaccttctgagagtatgaaaaagttaatgggtttttgtgcctgaagattttgatgttgcatttggctacatttaatccactttcacccataagttttaacatctaaaaaaattaaatcactgctaatgcaattaaaatgcattatgaaatgcatttctgtccaggctggagtgcagtggcacaatctcggctcactgcaagctccgcctccctggttcacaccattctcctgcctcagcctccctagtagctgggactacatgtgcccgccaccacgcccggctaattttttttttttttttttttaatgaggcggagtctcgctccgttgaccaggctggagtgcaatggcatgatcctggctcactgcaacctctgcttcctgggttcaagtgattcgcctgccttgctgggatgacagacgtgcaccacaatgtccggctaattttgtatttttagtagagacatggcttcaccatactggccaggctggtcttgaacttctgacctcaggtgatcccaccttggcctcccaaagtgctgggattacaggcatgagccactgtgcccagcttaagatctctgttttaatgttaatgctggtcagttgtgtctggattccagagggaggaaggtagaatgaggcatgttgacacctccccttcccatcatggcctaagctggtcttttcagtttactttggaatgtccttgctcaacaggaagggtccattcagtcggattgggtggcttagaattttatttttggtttacatctcaactatcacagcagccgggcgcggtggcttcacagctgtaatcccagcacattgggaggctgaggcaggggtatcacctgaggtctggagttctagaccagcctgaccaacatggagaaaccccccgtctctactaaaaatacaaaattacccgggcgtggtggtacatgcctgtaatcccagctactcgggaggctgaggcaggagaatcgcttgaacctgggaggcggaggttgtggtgagctgagatcgtgccactgcactccagcctgggcaacaagagcgaaactctgtctcaaataaataaataaataaataaataaacaaactatcacagcataaagtaggaatatttcgttactgtctagttaaactggttaatgcagaaaggaagtctggaaattccagttttaaagtaaaattttggacattgtaggattgattatttggcatagttgtgatgtttgttcctgcgttatggttttgttggcagggcagcctttaaggacctgtatattttcttctagactctatatattccctgtgagtattagttgtatggtcaaactggcaaattttaccataggtataaataatagagaatgtggaagaatagtgaatagtgtcagagatagttaaaagtccatacaatagtagagaaggtaataagtaatagtggcttggactaaatatttgttgaataaatgttttaaaaaacaggctacctacaatttgtgttgaagatatgaatgaatgaagtttccacacctttatgtggagacctgataagtaagcaacaataaggaagggtccccaggttggggagagccccaagttgagaacaataatgaacaatgattgtatgaacaattgttagaaacagctaatcacaaacaacctgcgggcacaatgacctcattccacacgtagcacccttcagcaggaccctataaaactttcctccagcccttgcctctttgcaggtagccccttctctgctgagctgcccactgcaacatattttcacaatttctctaataaatctgcccttctttacctacaactatcttggtaaatggctttaccacctgcaaaactgaccctaggttgttgctacccgatatggtttggctgcgtccccacccaaatttcatcttgaattgtagttcccataatccccatgtgtcgtgggagggacccggtaggaggtaatcgaatcatgggggcaggtttttcccatactgttctcgtgatagtgaatacatctcactaaatctgatggttttataaagggcagtttccctgcacgtgctctcttgcctgctgccatggaagacatacctttttgctccttgccttccaccatgattctgaggcctctccagccttgtggaactgtgagtacattaaacctctttttctttataaattacccagtttccagtatttcttcatagcagtatgaaaagtaactaatacactacccgagacatcttaggagatttgtaatagctgtaatgccaggtccaccatatttttagcataaagcaaatgtttacgcgtgatatgactgcacgggctttctttcagctggagccatagcaactcaagtagtaaccctatcttagtctgattaaaagtaaatattagtctgggcatggtgggacatgcctgtaatcccagtactttgggaggctgagacagaaggattgcttgagcccaggagtttgagaccagcctgggcaacatggaaaaacaccatctctacaaaaaatacaaaaattagctgagcgtggtggcacacacctgtagtcccagcaccttgggagggtgaggcaggaggatctcttgaacccgggaggtggaagccgcagtgggcaatgatcatgtcagaggtgtgtgaaccagagcaactccatcttaaataggagccaggaaaaatgaggctgaaactactgggctgcattccctgatggttaaggcattctaagtcacaggatgacatagaaggtcagcacaaaataccagtcataaagaccttgctgataaaacaggttgcagtgaaggagctggccaaaacccaccaaaaccaaaatagagacaagactgacctcccatcatcctccctgctacactcctaccagcaccatgacagtttacaaatgccacggcaacatcaagaagttaccctatatggtctaaaaagaggaggcatgaaaaatccactccttgtttagcatatcatcaagaaataaccataaaaatgggcaaccagcagccctcacggctgctccgtctatggggtagccattcttttattcctttactttctctctttttttttgagatggagtctccctctgtcacccaggctggagtgcagtggcgcgatctcggcttactgcaagcttcgcctcccgggttcatcccattctcctgcctcagcctccagagtaggtgggactacaggcaccggccaccacacttggctaatttttttgtatttttagtagagatgaggtttcaccgtgttaaccaggatggtcttgatctcctgacctcgtgatccacctgtctcggcctcccaaagtgctgcgattacaggagtgagccacggtgcccctcctcctttactttcttaataaacttgctttcacttcacactgtggcatcaccctgaattctttcttgcacaagatccaagaaccctctcttggggtctagattgggacccctttcctgtaactatcatgctactgcactccagcctgggcaacagagcaaggccctgtctcaaaaaaaaaaaaaaaaaaggaacatgacttaatacattcattttggaggataagtctctcaaaataggcctttcactgggggaaaatggtaaaaatactccctggtaattcaagaattggagactcctgagatgctgctcatattagctgagcacttatcaatacttcacttttttccatatatactcaaggaacaagtgctatttaaagtgtttcactccactgggctaggtgcaagactataaagaggtgtgaggatcaacacttttatgaaaaccagtgtcattctggatatagtttcagatgctagtgcaaaggaagctcttggtatacggaaaaagtattcaacaataaattaggcatggttgcttccattttctgcctcacatactttttttttcgtggttaaagtgatataatgtctatgatattttagattggcagttgcaaactagtggtcctcagcgtgctttttatgacacctacaaggtctgaagactttgatttcatattaaaaatctgggtttcaggctgggtgtggtgttgcatgcctgtaatcccagcactttgggaggctgaggcaggagaatcgcttgaaccagggaggtggaggttgcagtgagccaagatcgcgccactgcactcaagcttaggcaatagagcaagactccatctcaaaaaatgaataaataaataaataaaatctgggtttcaggccaggtgtggtggtgcactcctgcaatcccagcactttgggaggctgagatgggcagacagcttgacctcaggaattccagactagcctgggcaacatggcgaaaccccatgtctacaaataatacaaaaaaattagctgggtgtagtggagtgtgcctgtaatcccagcaacgtgggaggctgaagtgagaggattgcttgagcctgggaggttgatgttacagtgagctgagatcgccctcctacactccaacctgggcaacagagccagaccttgtcttaaaaaaaaaaaaaaaaaaaaaaattctgggtttctggcatctcaaaaaaaaaaaaaaaaaaaaaaaaaggaaaggtcagggcacatggctgctacagtcctctattaagcaatgtgccacagcagggtccctgacccctgggccatggacatgtactggtctgtggcctgttaggaactgggccacagagcaggaggtgaatggtgggtaacaattgaagcttcgtctgtatttctggctgctccccattgcttgcattgctgcctgagctctgcctcctgtcagatcagcagcatcattagattcttacaggagcatgaaccctgttgtgaattgcacacacgagggatccaggttgcatattccttatgagaatctaattcctgatgatttgtggtggaacagtttcatcccaagaccattaccatcctgcgccccatcccttgccgcctgtggaaaaattgtcttccacaaagccggtccctggtgccaaaaatgttggggactgctgtgctttagaatctgccatgaatctgcagcctctattatatagctccctatagactttgcttcctaccgtcttacgttctgccttataggcatttgactttgcaacccttgtttttgttagtatgctacgctggtgacattgaccaaattgaccacacattaattataagcttagttggtgatgacctcaacggaataacgtgacataagtattgtgacaatacttcttgcatgtatctgcaggtggaattgtaaacctggtggtccgagatggtctaattccatcttcctatgtatctccttatattaatagtggtaacatttgtggtggtgattcagcatttcaatgcctcttctcatggcaacaacaaacgttttccttctgaatcaacattaacctagatgttactgcggatcaaaattagactctacattttcaaccacagaaataccgagcagtaaaaatttttcttaatattgattgcctacataggttgtgtaattagcatatgtttacagttctatgatttctgcgtggctgctacagagctggagggggtaaagcaacagtattttctcagttgtccgagcagcattacattataataaataggtaatattaaactgggctgatgagagttgcaaaagactactttaatgttcatatggaaccaaaaaagagcccacattgccaagacaatcctaagcccaatgaacaaagctggaggcatcatgctacctgacttcaaactatactacaaggctacagtaaccaaaacagcctggtactgctaccgaaacagacatatagaccaatggaacagaacagagccctcagaaataataccacacatctacaaccatctgatctttgacaaacctgacaaaaacaagaaatgcagaaaggattccctacttaataaatagtgctgggaaaactggctagccctatgtagaaagctgaaactggatcccttccttacaccttatacaaaaattaattcaagatggattaaagacttaaatgttagacctaaagccataaaaaccctagaagaaaacctaggcaataccattcaggacatagggatgggcaaggacttcatgtctaaaacaccaaaagcaatggcaacagaagccaaaactgacaaatgggatctaattaaactaaagagcttctgcacagcaaaagaaactaggatcagtgtgaacaggcaacctagagaatgggagaaaatttttgccatctacttatctgacaaaaggctaatatccagaatctacaaagaacaccaacaaatttacaagaaaaaaaaacaaaccccatcaaaaagtgggcaaagcatatgaacagacacttctcaaaagaagacatttatgcagccaacagacacatgaaaaaatgctcatcatcactggccatcagagaaatgcaaatcaaaaccgcaatgagatatcatctcacaccagttagaatggcgatcattaaaaagtcaggaaacaacaggtgctggagaggatgtggagaaataggaacacttttacactgttggtaggactgtaaactggttcaaccattgtggaagacagtgtggcgattcctcagggatctagaactagaaataccatttgacccagccatcccattactggatacatacccaaaggattataaatcatgctgctataaagacacatgcacacatatgtttatcgcggcaatattcacgatagtgaagacttggaaccaacacaaatgtccatcaatgatagactggattaagaaaatgtggcacagatacaccatggagtactatgcagccataaaaaaggatgagttcatgtcctttgtagagacatggatgaagctggaaacgatcactctcagcaaactatcacaaggacaaaaaaccaaacaccgcatgttctcactcacagatgcgaattgaacaatgagaacacttggacacaggaaggggaacatcacacactggggcctcttgtgtggtgggggagggggaagggatagcagtaggagatacacctaatgtaaatgacgagttaatgggtgcagtacaccaacatggcacatgtatacatatgtaacaaacctgcacattgtgtacatgtaccctataacttaaagtataattttaaaaaataagtaaataaataaataaaaaaagaaacaattgctggctttgcaattctctttcctccaaaatcgccaaggcctcaatttactcattgctgaaaaaggacgactctgtatatttttaaatgaagagtgttgtttttacctaaatcaatctggcctggtatatgacaacataaaaaaactcaaggatagagtccaaaaacttgccaaccaagcaaataattatgctgaacccccttgggcactctcttaattggatgtcctgggtcctcccaattcttagtcctttaatacctgtttttctccttctcttattcggactgtgtgtcttctgtttagtttctcaattcatacaaaaccgtattcaggccatcaccaataattctatatgacaaatgctccttctaacaaccccacagtatcagcccttaccccaaaatctttcttcagttgaatctctcccactgtaggttcccaggccgcccctaatcccgctcgaagcagccctgagaaacatcgcccattatctctccatatcacccccacaaattttcgccaccccaacactttaccactattttgttttatttttcttattaacataagaagacaggaatgtcaggcctctgagtccaagctaagccatcatatcccagtgacctgcacgtatacatccagatggcctgaagcaactgaagatccacagaagtgaaaacagccttaactgaagacattccaccattgtcatttgtttctgccccaccctaactgatcaatgtactttgtaatctgccccactcttaagaaggttctttatcatctcccccacccttaagaagtttctttgtaattctcctcacccttgacaatgtactttatgagatccacctcctgcccccaaaacactgctcttaactccaccgcctatccccaaacctataagaaccagtgataatcacaccaccctttgctgactccttttttggactcagcccgcctgcacccaggtgaaataaacagccatgttgctcacacaaagcatgtttggtggtctcttcacacagacacgtgagacaggagttcgagaccagcctggccaatctggtgaaactctatgtctctactaaaaatacaaaaattagctgggcatggtggcgggcacctgtaatcccagctactcgggaagctgaggcacaaaaattgcttgaacccaggaggcagagtttgcagtgagccaagatcacactgtcaggcctctgagcccaagccaagccattgcatcccctgtgacttgcacgtatacatccagatggcctgaagtaactgaagatccacacaagaagtaaaaatagccttaactgatgacattccaccattgtgatttgtttctgccccaccctaactgttcaatgtactttgtaatctcccccacccttaagaaggtactttgtaatctccccaacccttaagaaggttctttgtaattctccccacccttgagaatgtactttgtgagatccacccctgcctgcaaacatggctcttcaccccctatcccaaaacctgtaagaactaatgataatccaccaccctttgctgactctcttttcggactcagcccgcctgcacccaggtgaaataaacagccatgttgctcacacaaagcctgtttagtggtctcttcacacggacgcgcatgaaacacacgaccgcacttcaggctgggcgacagagctagattccatctcaaaaaaaataaaacaaaaaggagtcacctcccccgagaggcctctggaccaccccatctgagcaggccactcttccttctctatcttaccatcttgtttctgtcccagtagttagggctacctccagtaatcctatttgtccctttactgtttagtgcgtctcgcttgactagaagctccatgaaagcaagagaccctacctgcctccttcgccactagacccccagggcctggtatgtggtgatcgctcagggcccattttcttcctttcctcctcctccaagggtggggaaagagcatcagaaggtctaggtggccccaggcccaaacaatgctcctttaaaaggaaaccagattgttacaaaggtcagaggctgaaaagttatttccgccttttatccctctaaattcttcacttcctgaaaaaacaaacaaacaaaaaagccactgagggcccttggactaaatccaggcctcagttgctgggcagaggtcagtcttgtccagacatgggaaaaaaataattcgagtcagacaggtgggtcaccagagaacgaatccagcctgcaaatggcctgtgcaatcttcagctctgtccagacctgcctccctttggggatgcctttaaaggtgatgaatgatctggatgaatgggcttagaagataagagggaaaaacaaatatcacaggtcaaatcgttatttgtcttcaagtttaacaccgtctactggactaaaagatgtccaaagaatagttgttcaactatgtaaattcctttttttctttttttttttttttgagacagagtctcgctctgttgcccaggctggagtgcaatggtatgatcttggctcactgcaagcaacctctgattttagtattgttagtacagacagggtttcaccatgttgaccaggctggtctcgaactcctgacctcaggtgatccacctgcctcggcatcccagagtgctgggattacaggcgtgagccaccgtgcccggccaactacataaattcctaacaacgtatctccagaaagtataggcacaacagcacatgcagtcattcctgtaattaagtgctccgggaggccaaggcaagaagatcccttgagcccaggagtttgagaccagcctggacaacatagcaagactgtgtctctacaaaatatacaaaaattgggctggggatggtggctcacgcctgtaggcccagcactttgggagaccaaggcaggaagatcgactgaactcaggagctcgggaccagcctggacaacataacgagacccagtctctactgaaactcaagaaaattagccagacgtggttgcatgtgcctgtagtcccagcactttgggaggccaaggtgggtggatcacctgaggtcaggaggtcgagaccagcctggccaacatggtgaagtctcgtccctactaaaaatacaaaaattagccaggcacggtggcacacacctgtagtcccagctacttgggaggctgaggcaggagaatggattgaacccaggaggcagaggttgcagtgagccgagatggcaccattgcactccagcctgggcaacagaacaagactccatcaaaaaaaaaaaaaaaaaaaaaaaaaaagaaagaaagaaagaagaaaagaaaattagccaggtgtggttgcatgcacctgtagtcccagcactttgggaggccaaggcaggaggatcaatcaaggctaggagattgagactgcagaaggaaaccctgtctctaaaaacaaggtccagctaaaatcagggtccagctccaccacaagcgcagctccaggggctgttgagttttgcctctaccattccaagtagtctctgctccagaccaagtcccaccatctggcagtcatgtcagtctaaccacagtcatatcagggcgcttccagtcattgagtgccccttgaggaggctggaggagaggccaatgacatttgcacttgagactccagagtctagatttataaccactatgttatggctgccagtgtggctgcaaggacacttctttcattcattcatttacaatagatgtagcatctgctgtgtgccagatgccattctaggttatagggaaacaaggcagagcccctgttttccaaggcatccacattctaggaaagactgctaccagcctggcgtggtggctcatgcctgtaatcccagtactttttgggaggccgaggtgggcggatcacttgatgtcaggagttcaagaccagccaacatagtgaaaccccgtttctactaaaagtacaaaaatcagctgggcatggtggcacgtgcctgtagtcccagctactcaggaagctaaggcaggagaattgcttgaacctgggaggcagaggttctggtgagccgagatcatgctactgcactccagcctgggcaacagagtgagactccataaaaaaaaaataataataataaaataaagactgctactaaacaataaaataaccaaaccagatagatgacttcaggtggtggtaagagctttgaaagaataagcaaggtaactaactggtcagaggaagggagatgggtgcattccctcagatagaccgccccagaggtctgcctctctgacatgacatttgagcagagacccaacaggaaaaggaagagactgctctatggccaggcacggtggctcacacctgtaatcccagcactttgggaggcccaggcgggcggatcacgaggtcaggaaatcgagcccatcctggctaagacggtgaaaccctgtctctactaaaaatacaaaaaaattagccgggcgtggtggcggatgcctgtagtcccagctactcggaaggctgaggcaggagaatggcatgaacctgggagatggagcttgcagtgagccgagatcgcgccactgcacttcagcctgggcgacagagtgagactccatctcaaaggaaaaaaaaaaaaagaaccaagaggtgtccaggcgaagagaacagcagatgcaaaggccctgtggcagaaacaatcttggtatgctggaggaataggaaggcagccagtgcagctggagcaggataggttaagggaggatcaaggtgatgagggcctggaaagaggggctggggtcgaatcaccagatcctgttggttgcaatggaagagcctggagtttattctcagagcagtgagaagccactggaaagttgtttttttgtttttctgtttttgagacagagtctagctctgtcacccaggcagactgcagtggtgcaatcttggctcactgtaacctctgcctcccaggttcaagcgattctcctgcctcaggctccccagtagctgggattacaggcacatgccaccacacccatctaatttttctttttcttttttttttttttttttgagacagagtctctgtcacccaggctggagtgcagtggcgcaatctcagctcactgcaacctccacctccctggttcaagcgattctcctgcctcagcctcccgagtagctgggactacaggtgcatgccaccatacctgggttaattttttgtgtttttagtagagacaagatttcaccacgttagccaggatggtctcgatttcctgacctcgtgatctgcccaccatggcctcccaaagtgctgggattacaggcgtgagccaccgtgcctggccagccaccggaaagttttatgtaagcaggggagtgatctgttttatcatttagaaggatacacacctcttcttctttttttagagacagggtctagttctgtcacccaggctggagcccagtggcacaatcatagcttactgtaacctcaaactcctgggctcaagtgatcctcctgcctcagcatcccaaagtgctggattacaggcatgagtcaccatgcctggtcacacttctcattctttaaaccagacctcatttgtccatctcccccatcccccgccccaccccacggactgtcctataatgcccatacaacaggtcactgtttagaaagtgctacaaagttacaaacacagtcccttctgagcctcccaccaatgttggtgggtacaaggtcaaaaaaaaaaaatctcatctatctaaggggcataggagactttttagttagagggcccaattatagtcctcctgaaaagatgccaaaagtccccttcaacacttagcaaagattcaagaaagatgaatctcacattctttgtatgggaaatgaggaacttgacatcttcaatataatggattccactaaaataagatgacgatcaataggaaccaactaaaaaaatacttgactagctgttattgaaaggctgaaattcagctgacataagcagtattaatattgagctagaaaataattcgcattgaattcagcccaacttttgttttctgatttgggtctcttctaaattttttttttcttctggacattgggaacaatccaatttgaaggcctcaatgcccaaatctacactcttgttttattctatatccttggtttcttttttttttttttgagatggagtctcattctgtcgcccaggctggagtgcagtggcgtgatcttggctcaatgcaagatccgcctcccgggttcatgccattctcctgctgcagcctcccgagtaattgggactacagatgcccgcccccacgcccggctaatttttttgtatttttagtagagacggggtttctccgtgttatccaggatggtctcgatctcctgacctcgtgatccacctgcctcagcatctcaaagtgctgggattacaggcgttagccaccgtgcccggcccacacctaggtgatttttaaagttcttctagtagagacagggtctcactatgtcgggtcgccgtgtttgatgtcagttttccctgccagaatctacaatctccttgatcaccattatatcccaacgtagagctcagtacctggtacaaagcacatttgatcaatacttgctgaataaagaaataaaaatgaagaggcactccagcctgggcaacagagtgagatggtctcaaaaaaacaaaaacaaaaacaaaaaacgactggaaaggagatgagggtacttgtgaagccatattatatgacacgctctgtgctaggacttttatataccttgtctcatctcttcatctcatataatccttacaaggatctcaaaagtggggaaatccccatataactgaagacgaaggcagttcagaagttcactgatttgccctaaggttcctcaatttgcaaacgtcaggccaatgatccaaccccaggtatgtttggcagtgaaggaccagttgagtcacagctgcaagtaaccaccctgcagtggtccctatcttggccgttagcttacattgacatttaacactcaaatttactcagtaacaccagctatcatgttttccactaaaactccacagcattctggcaacttttctattttagagcaataaagtaaattgttagcatccctttgacatataaatatttctacaaatagtaattctctagccattcatttggagtatttaaaactcaacattcatagcacattttatgtgacaaagaacttctgttcagaacacaaaaataagtcgtacatcttcattaaaaacgggtgaagaatttgaacaaacatttgcaaactaaaatacaaatgaaatacactcaacatcattagtcatcaagaaaataaaattatgagataatcactaataatcactacatatgcaccacagtgattaaaatttttttaagttaagccacgtgacccaacaaggtgcattcactcaagagaaacgcaaatatatgtccactcaaagacttgcacatgaatgttgagagcaggtttatactgaatagcgcaatgtgaaaaaaccccaaaatctagcaaaggatgaagggagaaataaactgtggtatatacatacaatagaacactactcaataataaaaaggattatattcctgatacatgcaatatgggtgaaccgtaaaaatatcatgctgagcaagagaagccaaacacaagagaacatgttgttatgatttcacgtacatgaaactttagtaaagacaagtctaatccatagtgacagaaagcaaatcagtaactgctgacaggggcaaatgaggagatgatctcaagggaaccttctggggtaagatgctgttctgtatctcgatcgtattggtggtcacacaagtgaagacatgttagaactcatcaaaccatacacttagaatgtgtaatataaacctcaataaagcaaaattaaaaaaaaaaaaccacctttaattttctcttacaaaaaaaaaaaaaaggaaaaccacttaactttaattttctccaacaactgattctggtacacagtataccttaatgcctgcatccacggcctcacgtcatgctgtttacatgaacgtaaagcttcgccgaagagtggaataagacagtcctgccagagaaaaaccaaaattactcaacgtaaaacaggctgttgatatgtttgcagatatatagcaagtcttaagtccaagactgcaatatagtttggctacttcagattgattgcagtagttttatctattacactatacccttccatcatttatcttctactcacaagaggcaagcacacagtaagagaaagccttttgttttgaagggaaatcttcttcagaatattaagtctaatttatcaatatacttaataaagcacattacaaaaaaaatgtcacagcacatttactataaagcagactgcagaaaaacattacaactaatgctttattatgaagttctcgaagatcaccattcattcagaagcccccatctctggtcgaactttaccccatttaggatgaagaggagagatctttgtttgcagcaaatctaaaatttacgtaatccgcctaaaggaactgtctttacatacaccacctcccaccccaaaaatagaagaaaaaactgagcaatttgccatccttgcgattatctcaggttcttccatctgccccatgtacttcccaaatgaaagactgcctgaaaacggcatgttagatttctggatttaccagcttgcccaactacaaatcctattccaaaaaactcaaaaaataaggtctttgttctacagtaatgaccattaatagtcataagagtgtgcttgtaaaaatatacagacctctgttgaaagtctgttagaaactgtggtctccaaagcaaacgagcaatacagctacaaggtacttagaactggcaaagactgtgaaactgttaaagtagaaagtctcagaggtccaatagtgatgcgggatgtttgcttcaagtactttaccacatttctgaaacaaaatatttactgtcaattaataaaaattacaattcataaccactcaaagaataaagcaattgataagatgctatcaaactgacatccaaagttagggggcagtaagaggagcagcctgctctataataaaatgatatcagcaagtcaagacatttgcttttggggatttttacattttatttcatttcaacctcagtttttgttggcaagcagcattcatatatcatatgacttctacaactaaaatgaagctattagcactagtatttagtaatctagtaactctccttccagccctcttcaccccatgtatgtttatcacatgatatacacaatgtacatttacctccgtaagagtaaacttactcagttatagactgccacttctgatcttgttctatcgggtttaaagcagttgccaaacaaacagaacttcttaacaatggaacttcaatggatttctgaggttcccttggatctggacttcacatgttacgaagcagttttttcatgtctacagaagttaaatgaaatgtcattaagttaatgtgcttttattataaattttgatttatgtttggcattattaagaactaatcaccaatgaacagctcctttaatatttcaggcagttaaacactataagcattactgagagctatataaaaatcatacttcatacaaaattactgtacctcagacccctaaaaagcagttgccttcaaaggctcaaaaatcactaagtcgaggtcaggtgtggtggctcacgcctgtaatcccagcactttgggaggccaaggtgggtggatcacgaagtcaggagttcaagaccagcctggccacgatgatgaaaccccgtctctactaaaaatacaaaaaattagctgggcacggtggcagacacctgtaatcccagctactcagggggccgaggcaggagaatcacttgaactcagagggcggaggttgcagtgagccgaaatcgcgccactgcactccagcctgggcaacagagtgagactctgtctcaacaaaaaagaaaatcggtaagtcaatctactatttaaggggacaaatctagacctgcattagcaagtcttgctcaatccagaatactcattaaactttttaataacatcttatcaagtgttccatttgtgataaagaacttaatgagccacatcaagatgaaaatcaagaaaaatatttagctgaaacactactttgtcctttatcaaacaaaatggctagataaatctcaaagtattaaggtggtcattttttttatttgacttaattttaagtgcttttcatttcccaaatcaaacataaatagggcagccctaaatttgttgcttcacatgggattctgcccccacaaaaatgtaaaataacttccagattttccagtaaaatatactaagccaaacattttgagcaacttgtccactaaaataactttaaaactattttctcaaatacctacctattttttcttttgaccctccagcaagtagattgatattttctcctggtaacaattctaattgctcggtacatttgacaaattttccagactcaaagctgcttaatgatctgtaattaaaatattgcttagcttgtattcctatgcagcctgtggaaccattaaaaaaaacaaacaaacaaaaacagaacaaatcctaggaagacagcaaagtacacagcatttttctgacaaaattccttccacgaggatgccattattttggtttttatgttgaagatgtgactaccacttaattagtactcaaattggagtggcaaaccagaaagtcacagctacagactttcagtggagctgactcgcccctgtgtctccttcctgttttcatgtgttgcagcctgttctcttcagagcctgacacactgacagtagacctctgcaggacaactttgacacccagttctctccaagctgccagtgagctccctgtgcagcctcactcctcacctacagcatgagcccttgcagctctcccagcatcacaatcttgtatctcagtcctggcttctttcactgctggcatccctctgtctctccctttttcacctacttttcttttttcaaagaattcttctctttcatctgcttatatgaaaaataatgacacctctgaaattctttcctgtagttctgcagcatcaatgccaggaagacaggcctcatcctcccagcttctatgctgctcctttcagatcccttaccctgtccccattttcatgacacgggctctccagccaggaagaagacactgtttctcactctctcttttccatctttgcctgtccctctcgctgtgtaacttcccttataactcagcctgaggccagtgctagaaaggcacatcacctgacttattctgtgcctgattctacctagatcagtgcaaccactggcttctcagggggacccttgagtactgggcactgatgaactgctgccaacacagtcatcatttctgccattaaaaggtcctaagtcctctccagtggcaggttccccaagtccccactatgctctataatgccctatgctttcagctaatgactcagtcctcagaaaaaacaaacaaataaacaaaaaaacacaggctttaatttcctctacccctacccccaatccaccatacactgccgaaattctgtctataccaactttgactgctttccttgaggcagagaaaaggtgagggccagttaatctatcaatgttctttctcctgtttcttcaacctctgctttctagtggctccttccccttggccaaaagaacataatctctccaacatttaaaataaacatctcatatttccctccagcaacagcttcctatcctcgacttcaagaaaaactcactgaccaaataacttacctcaagcttttcattttcaaatgtctctaccactcaatactattcaatctagcttcttctgtctctctacaaaactctttttccttataatccctagagcatctgacaaggctgactactcccatctggatgtcctatatctagggcacttcccttctcaatgtccctgttatttttttgaatggcttcctcttctatcctttcacaaaaatgctaaactaggattctgacccaggccttccttcctcttcactcactattctccagaggcttctctctggtttggttgcttacaaaggctctagagtatagagactgaaaaggaaagagggccttttctgtgtactaatcatctgcaaatctctcaagcttagactgtctccttagttcaaaatccaattcttaacagcttacccaacaatctcatctgcacatttcattagaaatcttaaaacatggcttgttctctgtgtgctcctactccagttaatagcattgtttctcttccctctaccattgcccccataaattaatggtctccatgcttccatacttgccccgcacctccagtctcttcaccacagcagaatgaaccaagtcagatcacaacacatctctgttcaaatcccacctgaaattttcagtcttactagaataacagccaaagttcttctcagttcccagctacttctctgcccttatatcctactgtttaaggcgctcctaaacacacaggcctcccagctatttccagaacactccaagcccatcattctcacatcaggtctaggcccaaagggcatcctgatgggcatgtcttgaccttgtgtcttccctccaaagaaggtcagctttacctaactgctttccttatggcacagaaaaggtgagtgaggtccaattagtccttctatcaataatctttatctaatctttgctttaaaaggttggaatttgtgtctgttttatgtgctgcctgggtcacagcacatgctcagtgaagcaattacacattaacccatttagcagtagaagtatcagacaaagtctaatgacctttatcttcccagccaagtgtctgcaacagagtgctcagttttgaattacagaattaataaaagcacagaggaatgagaagaaagtttaatttacagatgttcacaaactctgtcctcattagaataaatgtttttgatatattcagacctcatttagaaacaaagccatcaaatgtgattctttctaaagcagtacaaatttttctttatattcactctggcataatcttcaaactgtattaaggttttagaacaacaggttctgaaaattaataccaaatgactatctcagcagtgttttcccattatacaaataccttccctcatctctgatgtcagtttcctgttgtcattttcataatggcagtaagttagaaatataaccattttgtattactacatatgaccaattttaatatttttttgccataggaaaaacatcgtagttattggaaatttgttttataactggaaacagaaagccttactttatatagttgaagtcagctttcaggttgaaggaagtgctactggtactctttttcaagtcatggatagcgttctgccattcctgcacagcagcccaatcggcaattgagatgtagcactcacatgctttatttcctaaataatttataacctcaggggaagagtcagtcggtttggacagcacagtttttctggattcacctgaaagtattttataaagtaagaagagagagattcagatcaattagaaatatttcaaagagcacagaaacctaaaaacatgataagatcatcagtacgaaatatattactataacttttgctttatttaaaaatactgaacgctcaccattcagacaatgtttcgggctggcactgttacacccagcattggctaaggtgagcaccgatttgtcaaagctggagatgcagcaatgaacacctatcatggcacacaggtgttcctggtactccacagaggccttttcaaacctgaaaagcaaattgaagcagtcttatttctttatttatctacttacttactttttttttttttttgagatgaagttttgctcttcttgcccaggctggagtgcaatggcactgtctcagctcaatgcaacctctgcctcctgggtacaagcgattctcctgcctcagcctcctgagtagctgggattacaggcgctcgccaccatgcccggctaattttcttgtatttttagtagagacggggtttcaccatgttggccaggctggtcttgaactcctgacctcaggtgatccgcctgcctcggcctcccgaagtgctgggattacaggcatgagccaccgcgcctggcctttacttacttacttacttgttttttgagacagtcttactgtcacccaggctggagggcagtggcatgatcatggctcgctgcagccttgccctcccaggctcatgcaatcctccaacctcagcctcccaagtagctgggactacaggcgcccaccaccacacctggctaaaacaaggttttgctctgttggccagggtggtctcaaactcctggactcaagcgatccgctcacctcagtctccccaagtactgggatttcaggcgtgagccaccgcgcccagccccaaaggaggctgttattttaaacacacatatctcatttcccccctcccacaaaaaatggtgcaagaataaactgagctaaaacagtgagttgactatggtggggggaggtttgatgtcttcctcacaactatgaaactaaatttaaaagtggttaaatgttttttaaaaaatgtaagagtataaaagaactagtggaaaatattgataagtaactgatgtcagtgtgtggaaaggctttgtagaaggataaaatgcaagaaaagatgcacaagtaacagcatctagatgcataatgctgaaatacaacactaaacattaaaaacaaattataatcaagaaattggatagcatcaacaatcttagtatttaatgaaatttcacagattaacacaggaaaaattgagaggccatgaagacatgatccatgttttaaaaaatcacaaatggtcactatatggggcaacttctactattagtcattaatacatatagaaatgtaaagtacaataactattttcgctgatggtggtggcagcattcttgtttctcagtgactctcagtatccacaaaggtgaagggaagggggtactctattattaagggtatacattgcagccatcttttctgtagagtaacttagcaatagaatatatcataagacttatggtttggcagcctttcttctagtaaatcagtttatgagaatggattccaagaaagtaatcagaaatataagcaaagatattaagtgctatggtacatttagtaaaaaaaaaaaaatcagaaacaaccttaatgcccaacagtaagaaatattaaattatggtacactcataaatacaaatctttattaaaaataacactgtagaatacttaacatggcaattttttttttttttttttttgagacagagttttgcttttgttgcccaggctggagggcagtggcacaacctgggctcacagcaacctccgcctcccgggttcaaccgattctcctgcctcagcctcccaagtagctgggattacaggcatgtgccaccacaccccactaatattttttgtatttttagtagagacggggtttcaccatgttaggctagtctcaaactcctgacctcaggtgatccacctgcctcggcctcccaaagtgctgggaatacagatgtaagacaccgaacccagcctacctaacatggcaaattttttttttaaatattgagtgggaaaaacagatcataaaaccatgtgcctatgtatgctgctgttttggtgaagaatggagaaaacgacatgaaagaaaaaagaattacaaagcatatggatatggaaatatgggactacaaaaggacacacaacagaagttactacaaagatatggaagaatgagcagttcttttattttcctaaattcgcaagatttcattaaactaacataaatggacacagaatattatggtacaagctcctctatctggaggaagcaatgagtctgaatgtagagttcacaggactaatgagcaaatactctgacaataaagggtaatttgtatcagactctgagggggaaggagctcaactagggatcaagttcaaaagcatttataaaacaactgacaggtcttgtttttcagtgtgatttgccactaattcttaaataagaaaggcactcaagtattgctgctaactaaagaacaaactgaagatgcctcctggtgaagtgatttatagcaagcttcaatgctgaaagcaaacaaagctgttttaagatttggctacaatgtcagtgagtaatacaaagaatttaaacataaagtaattctatcacccatttccttccctccaacctacctcccttcagcctgttgagccactgagttaatccacagaagattttttccaacaatagatgatgaccagacagcaattccctgtatagcttcaggacaatgaagttcacatagtgcttctaccaccatcataatggttacttccaattcattcccctgaaaacgcattcagaaaagttagtcacccaataccattaaaacataaatccctataaaatttacaactgatcacagtctgtgcctgcttaaagccaaatgtatttaacaattattttcacaattttcacattatttagctcagaattctttaaaatgttacatataaaatagccacaaagggtgactaacagaaccttagcagcacatggatgtttgcacccccaccccaaagttacccaaacatttaacctgtgacctctgtaggaataacacatggagtaaaaagaaagcaaaaattaaatataaataaacaggaattaaagaatgattaacttcatgtgtttgaatactgcttgacattacctgaattgctaaacattttgttatttttggattccagttatttattgtgagcccactttcaagccaggaattactcaagcatttgtcatacgttataaaaacaatttctcctggccaggtgcagtggctcatgcctgtaatcccagcactttggaaggccaaggtgggcggatcacttgtggtcaggagttcgagaccagcctggccaacatggtgaaaccctgtctctactaaaaatacaaaacttagctgggtatggtggtgggtgcctgtaatcccagggactgaggcaagaagaggcttgaacccgagaggcggagcttacagtgagccgagatcacacaactgcactccagcctgggcgacagagtgctgtgtctcaaaaaaataaataaataaataaaaaatttcccccataaacaaattttcagaattacctttaaagttctaaactttgcacataagaaatatagttttaacatgttctaagatgaatattgttttaacatgaacaaaaacatgaacattattttaacttctaacactgttttaacacgaataaaataggtaactctggcagttgttgcttttacaaaatacaggatcaaaacctttgaaaatgaatccaagctttaacttattttatccatagattaaatcataccaaaggaattaaaccatgtttttcttattaacagacttaaaatgaatttcaaacacaccactttacctgagataggctggttgttttcatctctgtaagcaagtcaaagccatgtctcactgtcactgcaggctggcctgccaacaatcctaccctcatgatggagagtcgaatccgcgttagccagtcctgacaagtttggcgattggtatagaaaaaagttctagtcactttacgataagagaaagaaaagctcaggactggttcaatttgtaggtaaggatgtctcacctatatataaaccaaatacacaagtctattgtgatttcagctctgcacatactgccagctgtgaccattaaactgctataaaacaacactatctcatggaaaccaaccttgggaggtgaagttaatgcattagcacatccctcgtatgcattatacattaatttctccagatattccagatactgcagaagaagaacaagtctaagttggttgttaccatggccttcatcactgtctgcagttgtccactgactaacatcctgatcagggtttaatgtgtgagctgcgagacttcgaatgatacctgaaagcaaagacaacattctgaatttttaaaaatcttaaaagttcctagaataagtgtgagttttttatgatcaattcacatttatcaagtatcctctgtctacccatcatttaaaaataaaaaatcccaacatgaaagatctttcattttaggggaaaaaaatatatattttttccacacaactcccataagttttgggaaaaaaacaaacatatttccaatgcaattattcaatgaaagcttattctaacaaacatacctgaaaattactgacttcttttcaaaaaaatcatatactctcaaatctttaacaaagatttaaaaatccattatttcttaataaggctttgaaagtattcacatcacaaagcttgagcgagttaccttcaattgtctggaaggtgtcttgagctctgcccagtggggttctcagcttagaaagaacagtgaattgtgcagcttcccatacggcccactgccaaaggatagcatctgtcttcaggagattgcgtggaattgttgactggtcatgcttatccagtctctggcagctatagaacagtctttccaaccaattgtccttcctgggaaaagtagtttcatatttaaaagacaatgacaacttcattttaataatgaaaaaaaaatgcaaggggaatgggaataaggaactgtaattttccctactccaaaaaaaggcaaaacctatgaaattgagaagcattatgtcccccccctcttattttgaggtcttttatagttaacaggatgaggtacagcgtggaaggatgattagggtaaacggctcatgccggtcaggaatgaaactcattcaatgcaactaagcatctctagaatatctccacccccaccccattccccaaagtgttaatgacatcacatcagttaactgttaaccacatttcattactcaatttcaaagcccatttttgtttctacagatgctatcttcaaagtaattttcctattgatgaaaactgaaataacccatatgagaagaatgttacttgatactctgccacccccaaacatattttctcttcaaaactgcatgtaaagtaaagggaatcttaaaattatctttcctagataaaatagtcaaagaaatgccttaccctgttctatgagagttcccatacaaaataaaactaataacatcagagaaatcttgggggtggaatgtattacttggtgctttactcatgtgacttcttaatgctaaagaaatttcttgaatttctgtgtgattgttattgctgtagacagaaaataaagttgttgttacgcaaaatattttagcttaaaaggttagcacatactgtaagtggattatttacttattaactcactggaggtaaaaatatagaaaaattgagactttcaaatggatacggagatgtgattacaactttagatcctttttttattcacttcagatgggtcatgtgccgacatcataagaggatttgagggaggcatatcaaacatgtgaacataaaaacccaatcattatgcttatgtattacaaaaggatcaagtttaggctcttaaaagctcccaaatcaacttgatcaaaaacaataaaagattactgtttagtttttcaaatatctgagctactaagaaacatattttggcactacatgagttattctatactaattattgtgagcctataaagctcattaaaaatttttaattttcttgcagacctgcaaaatttgattatttgacatcacttcaatcactgacaagcagggccataaaagatgtgtcattaatgctctaataggtgatctgtcttctcctaaagtagacaaccagtagaggctgtaaatatcacagaatgtctttgctccaaaacaactgttataccttaggataacatctaaaggaattgatttcaacagttttccaaatgcttgtcgaatacgagttccacagtgcactagttgaacatggcaaacatcaacacatctatgaaagaacgaaatagacaaagcaggtgtgttaacatttcaaagttattaggattaatgtcaaaagacatgatcttaatttcatacctctgtaaaagatcatctggcaaggaagaggacagagcaggtagactgctgcatgcctgcagacagatattcacatcttcaacgagaactattaaacattaaaagacagctactttcagctggccaaaagaaattatatcccagtttgtcataattatctgaatccattcattcattcaacaaagagtgagtgcctactctagactaggcactgttcttgtccagaatcctcattgactgtcatgtttggaaaaatgacacattcaacaaaacccacgtaatgtaactgatgggtcatcacacaaaactttttctgagagaaaatgtaaaagtatatgcaaactataaacattcacgtaagcttaaaaatgtgacaatcacttcaaaacatttttctaatactaagaatgaaaaaaaatcaagactgtgtatctgtcattaaaatgaggattacacatctgcaggtcaggaaaagagctctattgatgaccatctcccattaccaaggattgataaacaaaatagaaaaaaaaaaacagagtcttactgttggctaaaaggcctttgcaaaatttatggaaagacggaagacagaataaaggtgcatatgtttcggacttcttcattaaaacagctacttccaaagcccaagtcattaacagtttcctgaaacacaaaatatacagttgactgtacattaaaaacaataacaaaaacaaaaaaacgttaaaagcctagtcttcttacattggttttctcttggtttttcaaatatctcaaacaataaaaaataaaaataaaaaatgaaactatagaaattactgtcaaaattgttgtgtgccttttaagaaaacctcccaacgcagcatgataatagcaaagaggccgggcgtggtggcttacctgaggtcaggagttcaagaccagcctggccaacaacatggtgaaacaccatctctactaaaaatacaaaaattagctgggtgtggtggcgggcacctgtaatcacggctacttgggaggctgaggcagaagaattgcttgaacctgggaggcagaggttgcagtgagcaaaactccgtctcaaaaacaaaaaaagcatagaatattaaaaatctatatatattcttctatgaaacactgggggtgggggattgaggtttttcatgtatttcttttcagaaagaataagaaagcctagattaaataataaaaccaaattataaggtgtttgacagtaaagaagctgctctacctcacctctataatccacattttttaaaattttttgtaattcacatttcttattctcaaattataaaggcaaattaacaaagttaggaatagttaatactatataaaatctgttacctcgtgtcctggttaaggttatctttcttaagtaatattcacagaagatttaatataattgagaaatgtttctttgtggccgtagttacagtgctaatcacagctccatcaaacaaagaaggagaggaagaactgaggctactagagataaagtgatcatgcctgaaagacaaagcatagattatcttttcatctttaatcaaagaaagcaagcaagtccaaagttaaatcaacatacatctttaaaatctatccattaaaaaaataaaatgttttgtggggttcttaagaaaaatttgtgaatacagtacctggtacaatgagaatacaatgtgtagagcacagcatactgaatggcagggaagtgaacagccaggtcactgtgcacaatcatcagattcttactcagaagtgcaaagacagttggagatagcgcccacatctgatcatgtacaaaacaaagtaagtttatggcttctccaaaataagcacaagcatacagagtttatccttcaaaacaggggtatttggactttttttatttggacatttttaaattaaaattacagattggaagggatctagtacactacaccttggacaaatacttttttgtgaagtcagtaaagcctttgcgtgcaatatagcatctctatgcaatgcagcaactccttgtctatcgctacagtaagaaaacagccacaggtcaggtgttgtggctcacacctgtaatcctagcactttgggaggctaaggtgggcagatcacttgagcccaggagtttgaaaccagcctgggcaacacagcgggaccccatctctactaaaattacaaaaattagctgggcatggtggcgcacacttgtaatcccagctactcgggaggctgaggcaggagaatcgcttgaacctgggaggcagaggttgcagtgacccgagatcataccaatgcactccagcctagatgacaaagttaagactctctctctcaaaacaaaacaccagccacatacgaaacacaggaatgagagtacctgtgttccaagaaaactttcttgagtcggagtctctcgctctgttgcccaggctggagtgcaatggggcgatctcagctcactgcaacctctacctccggggttcaagcaactctccctgcctcagtctcccaagtagctgggactacaggtgcccatcaccacgccctgctaacttttgtatttttttagtagagatagggtttcaccatgttggccaggctggtcttgaactcctgagctcgggtgatttgcccgtctcggtctcccgagggattacaggcgtgaaccactgcgcccagcccaacgagaactttctttacaaaaacaggcactagtgttgcgatggttgtacacttctgtgaatatactaaaaatcagtgaattatacacttaaaataacaaacaaaaaacaggtgctgggctgtatttggcccacggaccatagtttgctgatctctggtctaaacagagccctttgtatgtgccttttgcggaagtagactgtatttcttcaattttccatatactgcaaatggcaaggtgccctgttcaataaggaaacaaaggcacaccctgccactatacaccttttccatccatcttgttcctttacactgccaagacactccattccacctgactgccccagccccacccactttctccttatttctagagtacaggacataaacatctttgaatctgcaaataatgtgaataattttcctcaaaaatcaagctttcatgtttgaagaagagtttattgtgacttcaaacataagctgtaactggtaataagcgaagcagctatggaattatacaaggcaatccaatcaaacaacatggagcacactgaagcgcaaacatcaaattttacctttttcctcctaaaaactttattccctaattacatccattactttctttctttgtttctttctttttttttttttcttttgagacagagtctggttctgtagcccaggctggagtgcggtggtgtgatctcagctcactgcaacctccacttcctgggttcaagcaattctcctacctcagcctccaaagtagctaggattacaggtgtgcaccaccacccctggctaatttttctatttttagtagaggcgaactttcaccatgttggccaggctggtctcaaactcctgaccacaagtgatcagcccgacgtggcctcccagagtgctgggtttacaggtgtcagcaaccgtgcccagcctacacctattattttctattaaaaataatgtttttcaactctgtgtggtccaataggaagaagaaatacacaaaccataaacaataaatacaaatcaagagcagggccacgtcgaattacttaaaaaaaaaaacacacgggctgggcgcggtggctcgtgcctgtaattccagcactttgggaggctgaggcgggtggatcacctgaggtcaggagtttgagaccagcctggccaacatggtgaaaccaagtctctactaaaaatacaaaaattagcccgtcgtagtggcaggtgtctgtaatctcagctactcgggaggctgaggcaggagaattgctggaacccgggaggcagaggtggcagtgagccgagattgcaccactgcactccagcccaggtgacaacagcatgactctgtctccaaaaaaaaaaaaagctttttttttcccccctcctaaaagaaagactacaggttgagtatcccttattcaaaatgcttgggaccagaagtgtttcagactctgtatatgtttggatttgagaatacttgcacatatataaaatgagatatgtgggggacgcgacccaagtctaaacacgaaattcacttatatttcatagacgccttctattcatagcctgaaggtcattttatgcaatattttaaataattttgtgcatacaacagtttggactcatcacatgaggtcgggtgtgggattttccacttggggcatcatactggtgctcaaaaagtttcaaattttggagcattttagatttaggattttcagattaggggtgctcaccagtaagtgttatgaaaatattccaaaatccggctgggcatggtggtgcccacctgtaatcccggcattttgggaggccaaggcaggtggatcacctgaggtcaggagttcacaaccagcctggctaacatggtgaaaacccatctctactaaatacaaaaaaattagccaggcgtggtggcgcatgcctgtaatccgagctacttgggaggctgaaacaggagaatcgcttgtacccgggaggcggaggttgcagcgagccaagattgcgccattgcactccagcctgggcaacaagagtaaaacactatctccaaaaaaaaaaaagtattccaaactccaaaatcaaaaacacttccagtcccaagtatttcagataaggaatattcaacctgtatgaatgttcctagggaaaaaaagacagccaaaatataagaccatgtataagaactaacttcagtagacagaaagaaaaaagtaccaggggaagaaagagaccgcattttaaaacaactatacaaatttgagctgtaagaaacactgacattttctataagcatgctagagcaaatgggagaaattcataagacgttttctagaaaataaaactaatataaaaaaacttatcaagatttgtcaaggaaaaagaagaaacgttaaatataatggcaagaaaacattcctaccaattttatttatccaggcatgtcttaaatatggctgtttgttacatacagtgattctgcagacatgttgacatgacagtgaaatacataaatatgtaatgagaaaaggcttaactgtggataaaacaaagtcattacaattaaagactcgagtttttggcatttccagttgtagtcagggcactgaggtcaaatttaactacaaattttgcattgtctacattgaacacatgattcttaaaagcctcatgttttatttcagaacaggcctcaggaagttgcagactgtgcaggaggttgtttagggcacaagtcatttctcccaatattaacttataggcagtctccaaaacaggaatattcttcaagctgagcattgcttgataaacagcatgggctacagcaacaacctgaaaaacaaaaaattcaaggaagtgataaatggaaaataaatcttctaaaattatatggaaaataaatcactatctgtattagtgctgatgatacaaataaatttaagattgatcaattcactgtccgtagcacttaatattttaatttttaaaaaaccaatcagaaaactgacacagatcagtaagctatttcaaatctattaagttttatcacaaataaagagtactataaatgaaaactgtcaataggaaatttccaaaatggccgtttttttttttttttaaataatcaacatcaaaagacatatgcaaacagcagtttaagactgggtttcttaaatctaccaggaaagtctgtggtggatttgactagggggtggttgaaaagccagtcatttttgtttataaaatatacagtacttaatttataactttataaatgtgtcaacttgttttacccttatgaaaatttaataaatttaataacagcaagagatgcataatctgaaaagagtatctggcacatcattcatgaaagtattcagtatgattatcaagaaatataaatttaaaagaacaaatacaatcactatattctaaatcaaacatttcacatttcactcaatttcacttatatagcctggtaagcaacattaggtccaactcttcagtgactcaagttgtcaaaattcattatcagtatattacttacctctttttctttatgataacgcaagaatagtagtttagatgatggtataaacagtttttctacaaatgatgatggcagtttcgtatttatctgttcaacaatctaaaagaataaaatttttaaaaaatgagcttctcaaattacaaaaagacatggagaaaccttaaatgcacactggtaagtgaaagaagccaattgaaaaggctacatactatatgactccaactacatggcattctggaaaaggcaaaacgatggagacagtaaaaagatcaggggttgccatgggcttaagatggagggagggaggagtggggagagggaacgaggaaggagtgggtagaacatcaaagatttttagggaagtgaaactatcctgtatgatactggtaataggggatacatgtcattacacatgttaaagtccatagaatacataacacaaagtaaactataaaattagttaataataatatatcaatattcactcctttgtaataaatgtaccacactaacacaatatgttaatgagggggaaactgttgggatgaagaaggtatatgggaactcattgttttctgctcaattttctgtatatctaaaaaataaagtcttttaatttagaaaaatatatctaagctatattttaaggccttaatactgtgacattaaagtgtttagacacctaaataggacacacgtattttacagttatcatgggcattttttcacattagcaaagagaggtgtaaatctggcagaaatgctcagcagaatgtcatctagaatttgctttaaaataatccagctggagatgaaaggatagcaaagaggcctagatgaaaccagatgggccatttgtttctaattatagaagctgagtgttaaatatgtacaaatttattataccatgctccctatttttatgtgcttcagaatgtccataataaaagtggggggaggatatttatggttaagaaattaaaggaggccggccgggcgtggtggctcacgcctataatcccagcactttgggaggccaaggcaggcagatcacgaggtcaggagatcgagaccatcctggctaacatggtgaaaccccgtctctactaaaaatacaattgtgccactgcactccagcctgggcaaaagagcgagactccgtctcaaaaaaaaaaaaaaaaagaaagaaattaaaggaggccaggcatgattgctcacacctgtaatcccagcacttcgggagggcaaggcaggaggattacttgagaccaagaatttaaggccagtctagacaatgtagtgagaccccttctctccaaaaactacaaaggttagccaggcatggtggcatgcatctgtagtcccagatagtcgggaggctgagtgggagaatcacttgagcccaggagtttgaggctgcagtgagctctgattgtaccgctgcactccagccaggggaatacagcaagatcctgtgacaaaaaaaaaagaaagaaagaaaagaaaagcaaaaaagaaagaatctggtgcatagagcaatgtttcctcagaaaaaacgagtaaagctacactgagactagctatcaaccactaaaaatagaggcctggcagagtggctcatgcctataatcccagtactttgggaggccaaggcaggtggattgcttgagcccaagaattcaagaccagcctgggcaacatggcaaaactccatctctacaaaataatataaaaaattagccaggtgtggtggtgcacgcctgtagtcctagctacctggggggctgaggtgggaggatcacctgaacccaagaggtcaaggctacagtgagccaaaatcatgccactgcacttcatcctgtgcaacagagtgagaccctgtctcaaaaaaaaattgcattaaaaataaaagtaaatagacactaaaatgaaagcatagattataagactgatgaatgtactctaaaaaataatataataaagcaaagcccttattttttttcttttttggagacagggccttttttgtcaccttggctgagtgcagtggcacaatcagagctcacttcaacctcaagttcctgggcttaatcgatcttcctccctcagcctcccgagtagctaggactgcaggtgcacaccactacaccaagctaatttttgactttttgtacagatggggtctcactacattgcccaagctgtgccagaattcctggatgcaagcaatccttctgctttggcctcccaaagtgctgggattacaagcatgagccaccatacccagacaaagtccttaatttcttacatatcgatttaagggcctgaataaaccaacacattaaaaaggaaaagaataattcacataccagcgtgagtaaattcaagactgagatgatataattggtaccacaagtctggcaattctccagttggtctaatccatatgtaatgaccatgtcacaatgtatagtcatgctaggatccaagctgccgagcaaaacaccaacacactcattagcagctgtcaacacagcctcagaaaaaaacacctggtttgcagccgtcacacatctcattactctgtacagaacctgtaaatggggaaaacaagcagctttttacaaaaattcacgtgcttccacaaagcaagaaaatactttttatttaatgcaatttcaactgaaaattaactgcttgccttgccagcagtctcttaatattctagttctcagtagctgaataataatgatccctttactacaatatgtaaacatgatcttggctaaaaaatcctaaagtgctactatgacaggaaatggaacctgccatcctctatttcccatatacccaacttcgtttctcccaatgtcactaaatggctgaagctcagaatctttatcatgaaatacaccacgacagtaatggtattgacagcatgggaatagcctgcccacacatactacaagctagctcttgggcttttgggaatcaatctttcaaaactgaacatacaagtcactttaagcttattaaagtttctatctactgatggtctcttttgaaagataagcactctcatgcttaccacataatatcttcaaaaatcatattatttccaatacacacacaaacaaaatcccccacttaactataatggccaataattgtgtactaaatttctaataaaatgggggagaaaacagagcaaatgtttaaaaatatttctataatatttaacaaccaatacatacaggattttatttagtctacccatagttttcattaaaagtatccttggaggttgggcatagtgactcacatctatcatcctagcactttgagaggattagctggaaggttctcttgagtccaggagtttgagaccagccatgtcaacataacaacacctcatctctaccaaatttgtttttaaattagttgggcgtggtggctcacaccagtagtcccaccaactacttgaggctgaggtgggaggatcacttaagcctgggaggtcaaggctgcagtgagccaagatcgtgccactgcactccagcctgggcaacagagaccatgtctccaaaaaaaaaaagagtgggggagagagggcggagggggaaccattcttggccatgcatgcacagtggctcatgtctataatcccaacactttgggaggctgaggtgggaagactgcttgaggccaaaagttcaagaccagcctgggaaacactgagaccccatctctacaaaaataaaaaattagcaggagctgtggtgggaggatcacttgagcccaagatacagaggctgcactgagtcgtgatggcaccaccccactttaaaaagaaaaacaaaaaaagctgggtatggtgacacccgcttgtagggctgagtgaatgggaagttcacctgggcccaagagttcaagactacagtgagctatgattgcactactacactccagcctgggtgacagagtgaggctccagctccaaaaataaataaaaaaaataaaaaccccaccattctaccattctcaaaggcctaaaagatcctcataaatcaatatacacctatcctataaattatgtcccttttattttatgtctgaattaacggctttttatttcaactctgtacagtcttcaaacaaccaccttttagacattaaaaatgaagcaaagatattaaaccattttgaaaccatattggtttaaaataccaatatgctggtttcatttatctttaagttctgacatttctgctcaagtacacaacttactatataatcaatatcctattttatttagcaacatgttcagcaaaagtatatgctcctaaaagcgagttttatcctaacagtaaaattttcatcagttagattaaattttttatgactgtatcacacatgcttctttctccttattcaaagcagagtacaatgcctggggttcacttcttgtgtcttttccactgaaccctcattggatgtgctatatacagtgcagctaatgtttgaggctgctgaagtgtggcaatctagctacctcatttttaatttgtttatgttctttgatatcaggctatcaaagaatataaagatatacaagttttcatatgagttccatcttatgctcagagaaggttactttctgaggcttctcctatagtgtgctattcgtaatatgttgaaaaactaaaaggaaacccaataatttaaaagtaaaattataagatatattatttaaaaatgaaagaataagatttaaaaattcagagtggccttttgtcatgggagggtaggggagttggatgaaaggaggatgagatataacaggattccctgcttttctggttatttaagaaagcagtcagacaatatatacatatatacatacatacacacatgctaaacaaatgaaggattaataacagttcacctggtaaagagaatcatttacaatgtaaaacaattttatttttgaatgacacttcaaatgcccaaaagcacttacaactgttacgtatgcctcagtaattggaggacccgaattgggctgaagcgttccccaatgctcctcagcacagtactaaatacccggagaagcgcagccagctttggtgatgacactgatggaggagggacgtcttcatccactgattccccagaggccacatggctgaggtcctagatgtgaattcacagcattcttaataagtagtacattgtttaaaaaaaaacaaaaaactctaaaatatttcaatcaattcattttagaatagatttttaggcttttagaaagagaactgtggcccatgagaatattcatgactctgaatataaaaatgggttttacctaattatttcaaaaagccaacattaaacccaatagacaacaaattaaggaaataatctcttaaatcaactcagaaagctgttggggaaaaataaattctagcacatatgctctagttatatgtaggtataaatgaagacggaagcttttgccactcctgaattagtttttggctaaaaatctcattctaggtattctttgagccactcagctcaacagtaagtcctccaaaccaagagcatgcacatgaagagcaaagggagattacaagacctggtctacagatgtgtaactgaagaagtacgatatatgaaaaggacaagattcgcaaaaactaggatactagaaccaatgtatacatctacctaaaattaagcaccaaaataacagaagagaatgagatcttaaggataacaaggggaaacatctctacaaactagaatgtgtggcttatgagaggtagatcagctttaaacgtgggctgtgaaaaaagacattctaggtgtgggggcaaagaaaaaacaacgcagaagcaaaacatttccttgcttttctaggaaagagtaaacacatcagtacagctaaaggtactgaattcctgttgactacaagcagcaaagatgaaaaaaacaagatgaggccaaaatctttatgggagccttgattggttgatctgaataggggagaaacacaaagagattcagataagagatggcacagagttaagccatgacagtgcggccagaaaagccaagtaccagtaacagaggcttcagcagcgctcttaaagctcctatgctatattcgtacagccacaaaagctggctgaagccaaggcttgtcctccaaagtacgattcaagttctcctgtacatatgtaagaggaaaatctttaggagcttttggtgttttgtgtttttttataacacaacatcaatttgctttaagactctgaagactggggacaaaaaataaaaataaataacaaaaaatgtctttagaaaaataccagctaccaagagtatgtaaagctttgcgaaatacgaagcttgcaacgtttcttttagtctctccagtaattctcctggtaatttaaacacatctgaaataaatgtttaaaatactgactgggcacgggggctcatgcctataatcccagcactttgggaggccgatgtgggtggatcaccagtggtcaggagtttgagaccagcctggccaacacggtgaaaccccgtctctactaaaaatacaaaaattagctgggcgtagtggcgggcacctgtaattccagctactcaggaggctgaggcaggagaatcatttgaacccaggaggtggaggttgcagtgagctgagatcgtgccattgcactccagcctgagtgacagagcgagactccgtctcaaaaaaaaattttttttcaaaatattgcgatgggcttgtaatttctgcttaaatgtcaggaggtctgagccattttaaaataaatctagcacaattttaagattttttcttaaccaaaattttaagaaacagctttctatatactcacctcagcatatgcttccatgtcttctagaaactgaccaagaagagtcgtaggaaatgcaagatcagctacccaaaatggctccaaactctgcaaccacccttggaatcgtataagaaattgtgaaagggtaggggggagaaaaaacaccaaaaaatccaaattaaaaaaatataagaggctcgttttaaaaagtatctggttttcaagcagcataccctaaaacatgtcctatatcataaaattaagactgctaaacatgctgatcacgattaaccaatacctctttaatacctctttaatttctgcagaaattaacttgtaaatgttatttccttactttttcagtaaatttcatatctatattgtcactacacatgacttaagactaaaatgccacaatctaccattggcctggctaatcccagggccacatctaaccattaaaggtgtatactcatctcctcagtgaaaatgaaacagaccactatcacctgaatatcctattttcaaaagtttattacaccaagtaagttacgagaaactatgacacttgaaacaagctgaaatgtgcaaatgagccacgctagtcattcacttaaatccaaaaaaatgggaaacaaaaccatttctcatttatgacaattctccaaattaaccctatatttccttttttaaaaaaataaccagaaaaacaataaaatgtgacaaataacttggatcttccattgtccacttcagggtattgccactgcaatatattcttaccatatactttcctaccagtacaaactacaaataacttgggtaagtcctgtctgtacttactctacccacctactagtaatttcctctgaaaatatatatttagctaacaagtcacgttcatttacaataaaacatttctctgaattagttttcttgcattattaaagaaatggtattggccgggcgcggtggctcacgcctgtaatcccagcactttgggaggccgaggcgggtggatcatgaggtcaggagatcaagaccatcctggctaacaaggtgaaaccccgtctctactaaaaatacaaaaaattagccgggcgcggtggcgggcgcctgtagtcccagctactcgggaggctgaggcaggagaatggcgtgaacccgggaagcggagcttgcagtgagccgagattgcgccactgcagtccgcagtccggcctgggcgacagagcgagactccgtctcaaaaaaaaaaaaaaagaaatggtattgatagatggtcactgggggaccactgctcctccccgacagtatttaaataactggtataggctgcaagacttaccagatacctgctgcgtgagcgaaggtttctgagtatgatctctatgccatccaactaatatatcaactgtatccttgatggaaacaaagagagagggggccaatcattttaagatattactgccattcacctgtggaccatttcacagcaaaagatcctaaaaggagcatctatgttctacctacttgacattctagaaacttagaaaggggagaggggcaggaaaataaaagaactacatttctgacaacaatgaaatagtttattttcttcaaatattttaaggtacgaacgtcagaaagaaaaatgcggcatttaaccctggaacctcaaatatcactgattatattcaaaggagcagaggcattgttttccatctgattcctcagttcctcacacacacaaccatccccctcaccccatgatctgaacaacggaatgaggaactcaccctaaaattagcgctgaaaatatgagggtaacatcgagccaccaaaagaatgcacttaacacatttgcaaagcaattctggtgtatccacattttcaagaattgactgcaggctggtcattacaagcttaaaaataaaagttacaaaccgtgaacattcaacaaaatagggagaaaacaagcaaattaggttcattatttactgactacataaaaaactgagtatgagaccaagaaaaatagattctgtagttttagttaaaaaaaaaaaaaaattcacttgtaaatcccaactgcttgggaggctgagacacaagaatcgcttgaacccaggaggcagaggttgcagtgagctgagattgcaccgctgcactccagcctggacaatacagccagagtccatctcaaaaaaaataataattaataaataaataaataaattgaaaatatttcgctccactaagatgttaagctaaaaacaaatactgctttctcctcttcaatgtttgttaatattagtcctttgacatcagttaacattagtccttaataacatctgtttacaatatccctaaatgctctctttaagattctacctgtgattaaatttcaaatacaaaaaagtaaaatggatttgggaaacttttctataaagtacaacaattactttgcaatccaaaatataaagcaaattttatataatttatgctttagtatattagtacttgcttcatattaaaattaaagaagatcagtatggcaccacacatgaataacatgcaggctcaggttaccattatacataaatttttaaaataaatatatggcaaaaataaaataataaataactatttgtcattccattgaaagaatatttattttgcagctgttaaaaaacatttttccctaaaaaaggaaaagctgcgctttacatagcaatcttataaaagaaatgctagaatcagaaaaccatcattttacgctgggtgcagtggctcacacctgtaaccccagcactttgggaggacgaggcaggtggatcacctgaggtcaggagttcaagaccagcttggccagcatgatgaactccgtctctactaaaaatataaaaattaacagagcacagtggcacatgcctgtaatcccagctactcaggaggctgaagcaagagaactgcttgaacctgggaggcggaggttgcagtgagccgagatcgcgccactgccctccagcttggacaatagagcaagattacatctcaaaaaaaaaaaaaaagagaaaaagaaaaccattattttgcaatagccaatgttataatctacacaggcacagactatcaatgctaaaaatcatttaaaagacatcttaagggtaattacagaaatttgaatatagaacacatatgtaataaaattcattttcttaggtatgattacaatattcttgttatacagaagaaaaaccttattcttgggagatgcatactaaaacattatggggtgaactgtcatcatgtatatggttttcagatgctcaacaaaagtgtgtgagaaaataaaactgtggcaaaatattagtaactggtaaatctaggtgaagcatatattatgaaattattatcgtatttacaggtatttattttactggtgcatctatctttctatgaatgtgagaattttcacaagagatgggaaaatgttcataattatgcatgcagaataagcccaagctggtggcattctgttcagttacaggtaattttctgaatcctccctcaaatttttctcaaacctctataatcaagggggaaaatgtttcgttttgttttgcttttttgagacagggttgcctataatggagtgcagtagcttgaccacagctcactgtagcttcaacctcccaggcacaagcgatcctcctgcctcagcctccaagtagctgggattacagatgcatgccaccacgcccgactttttttttttcctttttttgatagaaacagggtttcaccatgttgcccaggctggtctcaaactcctggactcaggcaattcaccggcctcagcctcccacagtgctggggttacaggagtgagccaccatgcccagttaaaaatacattttttatttaaaaaaaaaaaaaaagaacattccttatatttcctttatattttttaaactacatacccaaaataaagcatatcaaaaactgtattaaaaaaaaaaccctaatatcagatattccaaacacaacaataccataatttaatcacttaaaatcttactcaaaactaaatcaatgatcttttaggccaggtgtggtggctcatgacactaatcacagtactttgggaggctgaggcaggaggatcacttgaggtcaggagttcaagaccagcatggccaacacaatgaaaccccatctctactaaaaatacaaaaattagccaggctaatggcacactcctgtaataccagctactcgggaggctgaggcaggagaatcgcttgaacctgggaggcagaagttgcagtgagccgagatcatgccactgcactccaggctggacaacagagcaagactctgcatcaaaaaaaaaaaaaaggaatgatgttttaatatattcagatacacaaatgtgaaataaaactaagtagagctggtattcatttacacataattatcttataccatttggaataagaatttggggcacgttagcaaaccaaaaggctcagaaagaagttgtgatatttagttcttgtctccctctacaaatgtgaagcactcttctatccagcattcctagtggagttcctattttcaaatttgcaaatcattctggtcctaagcaatctcaaaaaaacatttctaaaaaccaaagaggaaaaaaatccttttttttttttttttttttttttttttgagacagagtctggctctgttgcccaggcaatggtgtgatctcggctcactgcaacctcggcctcccgggttcaagcgattctcctgcctcagcctcctgagtagctgggactacaggcacgtgccaccatgcctggctaatttttgtattgttagtagagacggggtttcaccatgttggccgggatggtttcgatcccttgacctcatgatgttcccacctcggcctcccaaagtgctaggattacaggcatataggccaccgcgcttggctgaggaaaaaaatcttaaaactaacttatttcaaatctaacttcaacgtgtatctttttttttcttttgagacagagtctcactctgttgcccaggctggagtgcagtggcgcgatctcgactcactgcaagctccgcctcccaggttcacggcattctcctgcctcagtctcccaattagttgagactacaggtgcccaccaccacgcccggctaattttttttgtatttttagtagatatggggtttcactatgttagccaggatggtctcgatctcctgacctcatgatccgcctgcctcggcctcccaaagtgctgggataacagacgtgagccaccgcacccggcgtgtaagccaatttcttagaagaaatctctccctctttctccacatatatgcatatatgtatgtagcactaatccttgaacagtgtatcctttactcaaactgagaaagaggaatttttaaaacatatttcctatcagtagataacccctattctatgtttcccttcttcaagctcccctccaaggacatgtgttaagggacaattttcttcccaagtacatcatgcatttttcccccttcattcttacctgcattacagatgaaaaggctttcttttctcctacagtctctagtgctttgtaggtggcacataagtagaggagtttaacttcatcttttgcagatgagctaaatttgctaaaaatccacttgaagatcttctcagcctcatagctcagagaagcacaaagaaggccaagacagcaagctccctcctgtctcaactcctgaagcaatttgctactgtgtttattttaatgcaaacaaaaaacacacacaaaaggcttaagttttctatgatgacacgagtaatacatcttacaaaagaatgtcttaagtggttttttaaatttctattcaaactacataaaaggttgaaattttctccactctaaatactacattctgtctagcctgcattgccctcaagtatctgtctgacattactttctttttacaaaatcaattatttacaaacagtgagggaaggcccaaaaatgctaaattccatctcaaactgtattaaataactctcagaaaagggcagcaacaaataattagataaaacactctatacataactacattctacataatatccaatatgtaatgactataaaataaaaaatggtaatagttaaatacagaaacttaaaaggataacagtaatgatttacatagaactttaataagtaactctataaaacaaaaccatcaaaaggcactaaggtttatgaccagctgagataaattttgggtacttgccaacactgcaaatctttgggaatcaccataacaaaaaatgaccacacacctctggagacgctaatagccagagaatatatggtttggatccactcttacccaaagaaggaaattcctttttacctctattctctaagcagtttcaaattctctagtttacaaaaactaattttattcttcatgcctgcatcaagagtttatgccattccataagtcaagactcagttatccagtgagactagtaaattaaaaaaataaaatattccagccaggcacggtggctcatgcctgtaatcccaacactttggaaggctaaggtgggtggatcacctgaggtcaggagttccagaccagcctggccaacatggtgaaaccctgtctctactaaaaatacaaaaattagctggcagttgtggtgcatgcctgtagtcccagctactcgggaggctgaggcaggagaatcacttgaacccgggaggtggaggttgcagtgagctgagatcgcaccactgcactccagcctgggcgacacggtgagactctggctcaaaaaataaatattcttttcaagtggattccatttgtattcaaccgtaattaacacataattaatgcagataaaaatgacaagacccactgaaatgtcaatagatgttcataaacaaagccagtgggtttgtcttcttgtgtattgttaagtaatttctaaaaatatattttaaagtcatttaaaccgaaccattattagttacttacctttcattaagcacatcatgtgcagcagccaagatattatccaattgtttaactagtacctttaaaagaaaacacatttataaaaacttcaaattcctatacttttaagaatagcattgtgtacttttttacttgtcttcccctccaaattctaattcaacagtactttactttctttattattcccactccccaatgagcatgtatcaggaatgtcatgtttcctttcagcctatgaaagaaattcacccactggaaacatagagctgtgatcatcaacaaaaaaataaactcaaaaagtttgttttatttactttgaaatccatttgaaaaattgactgatggatggagggatagatggagagatatgtgacaaggcagtatttagggcaaaacattaacgacaaaaattagatgatgggtttaacagattcaatgtcaaattctttcaacttgctatatatttgaaactactcataataaaatttggaaggaggagaaacttgctttgatccaagtgtcatctgcctcactagaccattttcattaattttctcctgctcattgtcaagttctttttttttttttttttttaagatggagtttcactcttttcgcccaggctggagtgcaatggcgtgatctcagctcactgcaacctccgtctcctgggttcaagcgattctcctgccacagcctcccatgtagctggaattacggtcatgtgccaccacgcccagctaattttgtatttttagtagagatggggcttcactatgttgggcaggctggtatcgaactcctgaactcaggtgatccgcccaccttggcctcccaaaatgctgggattacaggcatgagccaccacacctggcccatatcaagttcttaattggtgtaaagaaagtgaagaaaaaaatttaacccttcctatactttgttacatttctgttgttgttttaagagacaaggactccctctgtcgcccaggttgacatgcagaggtgtgatcatatctcactgcaaccctgaattcctgggctcaagtgattcttccacctcagccaggtgtagtggcacatgcctgaagtcccagctactcaggaggccacagcgggaggatagcttgaatccaggagtttgagactgcagtgagctatgattgtgccactgcactccagcctgggtgagagcaagatcttgtctttaagaagaaaaagaaattacatattagagagcattaagttcttgatcatcataatacagactttccccattcttaaactactcaaggtagcattacctagtttattatggaaacacaaaaatcctcatatttccaaacatactatacttaccagcttattttctggttgctgaataaattctttcaactgctttacagtgaccaatcttcagtctctgtcgtcttcccgggtgatcctccgaagaagatttgacagtcgagactcatcacaataagacatcgatctctctgtgaatatataaacattttgttgtccattgagtataaataagcaaaggaatttttaaattttaaaataatttttaaatttttaaaattaaaaattatttaaataataattaaattattatggtggctcatgcctgtaatcccagtactttggaaggcgggtagatcacatcagttcaggagtttgagaccagcctgggcaacatggtgaaaccctgtctccacagacacacaaaaaattacataaactagccagccaaggtggtgtgcacctgtagtcccagctactcgggaggctgaggcaggagaatcactggagcccatgaggtggaggttgcagtgagccgagatcaccccactgcactccagcctgggtgacagagcaagaccctctctcaaaaataaaattacatcaaaagtcacagtccactggtcaataaaagctcagggaatataggtcctatcgctcttttgttcaactctatattccaaatcccagcagagtgcctggcacataacagaccctcaaaaaaatatttgctgaaggaaacgagaaatgaataaccctaggccagctgaacacctcattccagaggactggctgggagagaaaaaagaaaggccttagtaacaacttcctttgggtccattccaaactgttttcaacatgcaggtaaagagcctgggtgtaggtaaattaaacaacttccaaggggtacggataaagcctcaatcgagtaaaaacaggatataggcttctacttatcatctaggtatcccactggaggaaagcctcttattcacattatcatcatttccctgggatgaagttttggggagccataatcacacatttagttcaacaaatgtctaattatcatctaccacatgcaaggcatgcctccactagaaaggtagcaaaccacaacttttctccccttattttttaatcacaagaacaagcacacaatagtgaatactattagtatattaacaatgcctttaaaaactagatttttgctgggcgaggtggctcttccctgtaattacccagcactttggaagggcaaggcaggcagatcacttgagcccaggagttcgagaccagcatcggcaacatggtacaaccccatctctacgaaaaatacaaaaattagctgggcacagtggcacatgcctgtaatcccagctactcaggaggctgaggtgggaggatcgctttagcctgggaagcaaaggttgcagtgaaatcacactagtgcattccagcctgcgtgacagagcgagactgtctcaaaaaacaaaacaaaacaaaaaactcaatttttgcaaaacattttcaactgtgctatttaccataattagccaatacatacgtaaacaacaaatcacaaagggtctgacagtttcatttctaaggtatgagaaaaaattgataataaaagaaaccagaaggctgggcgtggtggctcacacctgtaatcccagcactttgggaggccgaggagggcagatcacggggtcaggagattgagacctgcctggccaacatggtggaacttcgtctctactaaagatacaaaaaattagccgggcatggtggcacgctcctgtaatcccagctactcgggaggctgaggcaggagaatcactttaatctgggaggtggaggctgcagtgacctgagatcgcgccattgcactccagcctgggtgacagggagatactccatctcatagataaataaataaataactacaaggggagcaaaacacactggatccttttggagggtggggggtgggaggagggagaggatcaagagaaacaaccaatgggtaccaggcttaatacctgggtgataaaataatctatactacaaaccctcatgacacaagtttaccagtgtaacaaatctgcacttgtatcctgaatttaaaagttaaaaaaaaaaaaaaaaaaaaaaaagaaactacaatgtctgagagaagaataggatttttacaaatccgtagcccatagagtatttcaataaggacagataccaaaaatgtcatcaagttaccagctgggaaattaggctctacttacaattctgtcactagcaaactacctttgaagaagaggaattgtttactgaactactttagagtcactgtttagcttctataatatcataagtctaaggcttcaaacactctgttttaacaaacagcatacatagcctttgaattcattccacttgtgaaaacataaaaagaaatcagttttttaaaagttatataccaacaataaaagctacaggcacaaagattttcaccaagatacacgaagcacacacacagtataaaaaaaaaaaaaagtcaaaaactaaatgtccaaaaagtaattacatctgacaaagcccataactcagctttaccgataaatttctctttaaggaaaaaaattatcattacctctaatcctctgaactttcttttttgttgttgtttttttgagacggagtctcgctctgttgcccaggctggagtgcagtggtgcactcagctcactgcaagctctgcctcccgggtagctgggactacaggcgcccaccaccgcgcccagctaattttttgtattttcagtagagacagggtttcaccgtgttagccaggatggtctcgatctcctgacctcgtgatctgcccgtctcagcctcccaaagtgctgggattacaggcgtgagccactgcacccggccaatcctctgaacttccaaggcactcacctatacagtgaggctacgccataaggcagaaatgctatcagtgtatttaactttagaaaagtgcccactctaggcagggcccagtggctcacgcctgtaatgagcacatgtgatcacttaaggtcaggagttcgagaccagcctggccaacatggtgaaaccctgtctccactaaaaatgcaaaaatcagctgggtgtggtggcatgtacctgtactcccagctacttgggaggctgaggcacgagaatcacttgaacctgggaggcggaggttgcagtgaggagagattgcagcactgcgctccagcctgggtgacagagcaagactctgtctcaaaaaaatatattgaaaacaacaacaaaaaaaccagaaaagtacccactctagggggcggggggaaggagagcatcagcaagaatagcttaatggatgctgggtttaatacctagatgatgggatgatctgtgcagcaaactatcatggcacacgtttacctacataacaaacctgtacatcctgcacatgtaccctgaacttaaaagagaaaaaaaaaaaaaagacagaaaagtaccccctctatatatatatctatatcctccacaggcccaagagttcaaggacttgctgtagtaagagcctactatgcactatacattcaatatccacgataattgggtaaaccttttctgtaagatcttatccagtcttctaatcttgttttaagagaattctcttttaaaatgtactataacctttctagtgggaaattaacaattcacaggaaaagaatgtaaacaatttttacctgcacagtagactaatcaacttatgcctgtgcaaggcgttagtaagaggcatccagaataagaggagatacaagtctttggaaggtgtatgtgattggtccccattttcccagacttaccctgtgatttcctcatgtctttggtggctaaagcacgactgccatgctgaacactggtgaactcagggctggtcacattgttaaccctcagctcttgccccaacgacttccgaccataagtattttccccagatcctccattgacactgtagccacctacaaacagcaatgtgtacgttatttaaatatgattgttcgtttcattcagtcaatttcctgatagctcaggatcttactactcaatctgcagctcaaccagcctttgcttctcctacctttttcctgtactgtctgccttgaaaatcattttcatttcttttaatacacctttgaagttaaattaattttattttgatcccttcattggaaaataagcaaagaaatgaaaactaaattaaatcaaattttgcaccttaaaactttcttgaagtttagagacagtagccaagaggaacttcaaccttagctaaatatttttgaaaataaaaacaaaaatagtattgtatcttttttgtaagaaaactgcattgatgaattatgtacggaaaaattttaaattttaaaaataataaagtggataaacgtcctatgaagttttcagaaataacactgcatttgttattcgtattttaaatatattagaagaaagcgagaaagttgggggtgtaagaaggcaagaaggtgggataggtaggttcaaaaaacatgcttgtagcaataagaaaatatatatacccttttcgtcattctgtatgtcagcgtggactctggtatcatcgtgcctttgccgagacaccacagctgaatttgaaggttgcagtccgtaagaggaagaaccacctctatctctggatgaagaatattttaaattacctgggtcagctgatgcactatcagttctataaaaagagaaaagtttaagattagaactttaaataacataaataaatctttctttaaacaagcctctcttctcccaaattttacatttaaccattactattgtatttaatgtaatatgtactatatattatatgtaagcactcagccgtctaataagaagtctttcactgggaagagattctcaatggatgaaatgccaacttttcagtctcttctactgttctaaagacccattcagaaatacgaataactactgggattagggtgactttgctggttttagcattgaaagcctcctgtcccaggcaaaacaggacaattggttactctggtccagtgttctcctcacatgacttgataataagaataattctttctaaattctcccccatggagagggttaatcagtcaaaacatttcagcctttcctatcataaaaataaaaaacactggcagcatgtcagggacaggcaatgtcttaccaagttattttctaagtactgattaggtactgtagtattgaagaccccattgaagatgccttaattgtaaaggtagcaatcaaaattttaaaaagtaaaaaagaagacattttaagaaaataaaaggtatcagaaatgcaataacgttatatcggaaagttgtagttcataatctatttaaaatttaggtactgtttagaataatacctgatgcttattagtaaacaagtagggtacagccaagggtaaaagtttgtcctcatctaagtatctgctctacgcttcaactgcctcataagtaaaacagagctgagttacaagacttctcacgagtgttactctttcagccatcaatcataaactattaagaaagaagacaacaaaataatctgttatagcatatgaaaaatccaagtaagttcttcccctactgattttctcctgagaggaacaactttgaggaaaaaaaaaaagaaaatcacttctatgatatttactaaaaatgctttctcaaccttttagaacctgaatcttttagaaaagtttaggacactggcaaggccagaaactaacctattcctctacgctttgcccctctatggtgtaaaagtgacagcagtgtttgtatactgtatatatttcatttagagtttattagtctttccttgctcccaaaaatactaaacataaaactttgcatgagctcaatcagttggacaccttgatctgcacttactgcaatcactgttaatacagaatgcagacaataggtccaattaaacttggatatctaactggtacaagtcattacttacaaaggatctcaatctgaaacttcatgaaattcaaaacctagcatactaaaatgactacggctccataaggagtaccttctaatattcagagttcgcttattcataaagctaagtacttcgaacataagggaaaattaaatctatggaatttcaagaaaaatgtatgagaatattttctgagtatactaagtctataagcattaaaatattaactcaatggaccataacttttttaaactaatgaaaagacattccttatgtacctaaaaatagcacatttaacatgcgtctatataaatcatagcataccattactttctgaaaggagactgaaatgtaagagagcttataatcttttctgacagggtgtgaactttatatgtacgccacagtaagctcttattagatgagcaaataaaataagcacttgactaattcagaaacacaaagataactgaagtctgccaatatttaaacatatcttcacttcctgttttcatcatgtttacttatctcctatactacctttactattaagagttaaatgtttgtatcattttctggtgacacagtagtaccataaggcagcagagaatacaagttaaaaaaagatctgggctcaaatcccagctccagcactgaaaagtatgtgtgcctttgcacaaattacttgatctccaagccttggttgtctcttgcataaaatgaggatgatacctatctaacatgtaaggttgttgtgaggcttaaataagataatgaattataaagaaacacttagtttgcagggtatgttaaaagttattatgaccataatacaaaataaactcagtttccagtctaaaagacaatgtacaaacagttcatgagtatatgaatataatcaaaacaagtttttacagtcaatatagagcaacttaaatacttcactgaagaaagcaggtaatctgtggctaccaacaatgtgtttccaactaggaagcatctgatttcaaactaaactgtaaaaccaggagcagcttccccattggttagaaataaggtttctaaatcccctaagttatgaacactgagatttttttcccaaaaaaatttgtgttttcagaaatatagcaaaaaaactggaatagagccactgtctcagaaatacctgaaaactccctagctgccaaattattttaatacaaattgatcaaagcatccccaaccagaactcaggttgtaagcattctgaacctaaaagcacaaaatggtttagcatttatacgaaatttctatttttatacaatcttgactgcttaggtttcaaaaaatgtcaatgtcaggctgttagcaccaacaagatcatcccagtccaataaatagaaaactgttaaagaacgggaatgagaacttaaaatgaggcaatcaaagccacaaaatagaaactgcagatttgaactccaagaagcaggcatgaatgttaggctagttagttagaagagctgaaagggatatcatctgccagaattagtgtctcaatttagtgaaaaaagaaaatctatctgttaagtctaagaatcctaacaaggatccaaaaatacttctacagcccctttaatattctaaaaatatcatggagagaaaaaaaaagaaatgcataaatttccccaaaacgatcaaactaaagttaaagcctgaggtacatgccacatgagaggtaagtttctaaagctcatacctcaaaaatcgcatactgtgtaacatggagcctttgtgatgttttgcatcaagtcaatctgtaagacagtagttacaatattagtgaagacagtgggttaaaacatttgttgttcaaacatggagcaaatatcattcatgagttaggtgcctttagttgaactatggtcccattagggttcatacattaaagcaaaaattgaggtggaaagccactccgtgccttacaggataaagaggcttaatgtggcaaccaaaaaatttttagtacataagagaatttaaatgttaactataacatacaaatcacatgcaaatatagttaccacttattttagttacctcttctcaatatacagaaaaatgccacaaatctaggaggccactggtttcaaatgaccggaatccttagacctcacaccaacaatccaccatgtggtggggatggtatcgcctgactaaatgtagtcttgcagtccattcttgtaagtattagagagaaaaagagagagagcgtcatctctgcaaagtgtgaagtcagggacttccctactaggaagcatttccataaagcaccccaaaatgacttgatgcaaacaccacacctagtggtgtcactggagtaagcatcatattacttcaaattgcttttacctaggtttattaagggattttgctctcatgctgagatctaatttgtaatggatataaaccaggaaatgagatttgcactaaagccaatgaagtaggaatgtacttattctctaaagtagcaaagatagtctcactgtcacagagcagttataggatatgttgctttccatactaatggttaataccacttggaaatgatttacccttcaaaaataaattcaaggttttcccctgtaatgcctcttacctggattcaaacatgctttaatgaggaataagagaaagggtgaaactatgaataaccccgggccttgtatcattacattagaaacactgctctaaatatgagtctatggctaaaatattaatttgagaggctcagggaatttattatacaaatctcttcttgcagagaactttaagttcaaatttaataaaacaaaacagaaccattccacgtcaaaattgtaaatgagtatgcatcagttttgcaatactgagatactaaattaatataatttattggtaaaactagtttaactacctcagtattaagtgtctataataaccaaatcttaattatccatttatgggtgatttgtttccttttttgagacagggtctcactctgtcacccaggctggagtgcactggcatgaccatagctcactgcagcctcgacttcatgggttcagcctctcaaacagctgggaccacaggtgcatgccactccatttagctaattttttatttttatgttttttggagacaggtgtctgattatgttgctcaggctgctctcaaattcctggactcaagcaatcctcctacctcagcctcccaaaatgctaggattagaggcatgagtgaccacatctggactgtcaccaatttttaactgtctctcaactaaacagccaatatagactgataaaatatacttaactattgtaaaattgtaaagaattgtatcttcaccaaggagaggtctggcttttacctgtgaattctggaaggtaatctctaaactcttgaaatgtcatacctaataagagggtcctggccaggagcagtggctcacacctgtaatcccagcactttgggaggccaaggcgggcagatcgcttgaggtcaggattttgagaccagcctggccagcatggtgaaacctgtctctactaaaaatacaaaaattagccaggcatggtgacgggcacctgtaataatcccagctactcaggaggctgaggtttcagtgagctgagatcatgccactgtactccagcctaggcaacagagcaagactatctccaaaaaaaaaagggggggggggcggcggtggggggaaagtgtccttgttcatctgggggctttaggccacagcagagtctaataatgtggcttatggtgggggctttgagtcacatggatcagcttgacctccagtggggctggagactaaggttagccacatgggcatgcaaccatggaaccccagtaaaaacgttggacataaaaaatagagtgagcttccctggttggcaataatccatgagtatggtcgcacaccagtgccaccaggaaggtgtcatttttcacaactctacagggacaggacaattcaaaactccaacatttggaacttccccgaactctgccctatgcacctctacccttggctcattctaatctgaatccctaaactgcaataaactctaactatgggtatgagagctttcaatgagttctggtgagtcctcctggcaaatcatccaacctaagagtggtcttggccaggcacagtgactcaagcctgtaatcccagcacttcgggaggcccaggcaggcggattacttgagctcaggagtttgagaccagcctggcaatatggtgaaactgtctctaaaaaatatagaaaaactagccaggcgaggtggtgtgtgcccatagatccagcaactcaggtggttgaggtaggaggactgcctgaacctgggagggaggaggtcagggcacagtgagccgtgatcatgccactgcactctcgcctgggtgacagagagaggccctgtctcaaaaaaaaaaaaaaagagtggtcttgggaacccccaaacttgcaactagtattagaagcaagggtcatcttatggactggactccctcttactctgcactcatatttaaaaccattaaatatactgtagctcaaaaaaaattgctcctttgttttgaaaaagggtctcacactgtcgcccaggctagagtgcagtggcgcaatccgagctcaagcaaacctcccacatcagcctcccaagtagctgagaccacaggcttaccccaccacgcccagcaacttttgtatttttttgtcccattctctacaacattcccaaaatgttgcccaagctggtctcgcactcctgagctcaagtgatccactcacctcagcctcccaaagggttgggattacaggcataagccactgcacccggccataaattttgttttttagtaacatttctagcaaacatgataaagatttgacttcagtgttgcttattttccttccaaggaacctctaatattctctattttcagaactccaatcaaattagccagaaagagcaaacgaagccaataaatctaggagggcaatagatctgattttaacccttgtttcacatgcacaattgtcttcagagaaaagctgaagaaagtaccccctcacctccatgccccaatgctccttttctctgacttcaagtgggcctctgatgctgcccacatttccctcaccaggtttctttcctttccaaaacatctgtaaaactttctgcaccttcttccttctcccaccactaccagtggatgaccttatagatttctgctccatgagaaatagaagccatttgacagcaccctcagcaagagctaacattttagctcctaacaagagctagtgggcaactgatccaagcagtttacaaatgtttatcatgtcatttcgtgttcaacacaatcctattagttataacttgataactaaggtttcataactggcctaaggttgcacagcttgtaaaaggcagagtcagaactcagacccagtactgtctaatgtttgagctcttcaacactccatcgctgcctgtcatcttccttctaatatatccacaaattcacctgcatctgcacatacaccttttcttcccatcatcttcccataatggaacaaataaacctcctatccatagaaatcatctggatctgtctattccccccattttccaaggtatgtcttgtcttttttttttgagatgtagtctcgctctgtcgaccaggctgaagtgcagtggcgtgatctcgactcactgcctcccggattcacgccattctcctgcctcagcctcccgagtagctgggactacaggcgcccaccaccacgcctggctaattttttgtatttttagtagagacggggtttcaccatgttagccaggatggtctcgatctcctgacctcgtgatctgcccaccttggcctccccaaagtgctgggattacaggcttgagccactgcacctggcctgtttcttttgtacgttgcaaaatctcccattttactactgcttatcacatcgtcaacatatgagcactctcaaaagtcttactttaaaaaaaacaaaaacaaaaacaaaaacaaaaaatggccgggcacggtggctcacgcctgtaatcccagcactttgggaggcaaagacaggcagatcataaggtcaggagattgagaccaccctggccaacatggtgaaaccccatctctactaaaatagaaaaaataaaactacctgcgcatggtggcacgcacctgtagtcccagctacttgggaggctgaggcaaaggaatcatttgaacccgggaggcagagcttgcagtgagccgagatcgtgccactacactccagcctggtgacagagcaagactctgtctcaaaaaaaaactaaaggccgggtgcagtggctcacgctggtaatcccagcactttgggaggtcaaggtgggaggatcatgaggtcaggagttcaagaccagcctggccaatgtagtgaaaccccgtctctactaaaaatacaaatatcagccaggtgtggtggcgagcgcctgcaatcccagctactcaggaggctgaggcaggagaatcgctcgaatccgggaggcagaggttgcagtgagccgagattgcaccatttcactccagcctgggcggcagagagactccatctcaaaaataataataataataaaataaatttaaaaattaagaaaataaggccgggcacggtggctcacgcctgtaatcccagcactttgggagggcgaggcaggcagatcatgaggtcaggagtttgagaccagcctgggcaacatagtgaaaccccgtctctactaaaaatacaaaaaattagccgggtgtggtggtgggcgcctgtaatcccagctagttgggaggctgaggcaggagaactacttgaaccccggaggcggaggttgcagtgagccgaggtcgcgccattgcactccagaccgggcaacagtgtgagactctgactcaaaaaaaaacaaaaaacaaaaaaaccctttaactgcctttctccctctatcaatctaatagcctggactcttcacagacaaacctgttgaaaaatttatcttccttgccttcatttactttttaacccactttaatctgggttccacctgcaacacaccactgaagctattcctactaagataggaactgccactcaaggccttcttggctctaaaagcccatgagcctttatcagttcaccttacaatttctcaataccattctaaagtttatgagttttttaactttaattccagtgactctttctactttatcccaatccaagtattctcctccttctttactttttttttttttttttttgagacagactctgactttgttgcccaggctggagtatagtggtgcaatactggctcactgcaacctccacctccaggttcaagcgattctcctgcctcagcctcccaagtagctgagattacaggcccctgctaccacacccggctaatttttgtatttttagtagagacagggtttcgccatgttggccaggctggtctcgaactcctgacctcaagggatccacccgcctcggcctcccaaagtgctggaattacaggcgtgagccaacgtgcccggccccttcttcacttctttaaccagcttagatttcattgtgtatcatttcaacaacactcttgcctatacccttaactcttaagattttcatcacagccatctggcaaaaccccaatcctggataaacccaacgatccatcaataagcaccacactcccaggtcctccagtgtttacttcccattctatacatgcactatccagacattcccattctcttcaaattccaaaatatcctatccacctgccctccccatacacacattctacttcaccaacaacaaaaaaaaaggtaccagctgggcacggtggctcacacctgtaatccctgcactttgggaggccaaggcaggtggatcacttgatgtcaggagttgggacaccagcctggccaaaatggtgaaacctcatctctactaaaaatacaaaaattagctgggtgtggtgatgcgcacctgtaatctcagctacacgggagactgaggcaggagaatcgcttgaacccaggaggtggaggctgcagcgagccaagactgcaccactgcactccagagcctgggcaataataagagcgaaactccgtctcggggtagggtggggaagataccataaaatatctgcacccgattctagaccttactgaggattccatctacttccaccttactgtaactttgcaaatacttttcccactgaactaaatcccccccataaacaagcaacactttctaatgtatcccattgaaaaatacaaaaacatataaaaaggaaaaactccatcaatcccacatgtccctccatcaaacaatctgccttacttgctgcagccaaactaaagttgtctagactcccctctcccatttcttcagttcttctagctccttaacacacactggtccaatttctgccccatcactcttggcaaaatccattatgacctccaggctgctaaatccaagatacagttcaggcctcaatctgctcatcctttcagcagctttcacagggctgctgagtagggttgagcagttttgccctgcacacaggtgccctgcagaggaatgaggtgggctgaatgaaactccttttttaaaaattctcggctggcatagtggctcacgcctgtaatcccagcactttgggaggctgaggcagacggatcacttgaggtcaggagttcaagatcagcctggccaatatggcgaaaccccatatattaaaaatacaaaaattagctgggcgtggtggcgggcacctgtaatcccagctactcaggaggctgaggcaggagaatcacttgaacccaggaggcggaggttgcagtgagccgagactgcgccactgcactccagcctgggcaacaagagagaaactccatctcaaaaaaaaaaaattgtttatgccaactaattgtacacctaaatgcaccaagttcatgactttctccttgcatttatttatttatttattttttaattaggtctcactctatgttgcccacgttgtagtgcagtgtgtgattacagctcactgcagccttgaactcctgggctcaagagatcctctggtcttagcctccccagtagctagaactataggtatggagtggctctctgcctttatttctaacccaagctaccttacaaccttaaaaagagacgctgcttcgccaggcacagtggctctcgcctgtaatcccagcactttgggaggccaaggcgggcggatcatgaggtcaggagttcgagaccagcctgaccaacatggtgaaaccctgcctctactaaaaatacacaaaaacttagccaggcctggtggtgtggcgcctgtagtcccagctactcaggaggctgaggcaggagaatcatttgaacctgggagacagaggttgtagtgagccggaggttgtagtgagccgagatcacgccgctgcattcccacctgggcgacagaacgagactcaaaaaaaaaaaaaaaaaaaaaagagagagaccctacttcagctctcaattgcatcgcttatcttccccttttgtcagttaagtcctggaagtaccctagaaacctatcatttggcctgggaaattgccaagattgaaaggaaatgtcttactctatgacctctttaacagatgaaggacaaaaaaggctgaaaatgtacaaagatatgcatccctcccccaccagttaaatgccaaacataggccagccacagctgatcacacctgtaatcccagctgtttgggagtccgaggcaggcagattacctgagttcaggagttcgagatcagcctggccaacatggtgaaacccagtctctactaaaaatacaaaaaaattaggcaggcgtggtggtgcacatctataatcccagctactcgggaggctgaggcaggagaatcgcttacccagaggtggaggttgcagtgagccgacagctcgccactgcactctggcctggagaacagagtgagactcagtctccaaaaaaaaaaaaaaggccaaacatagcccattccaaccaagattaagaatcactaagagttacattgcaccactgcacaccagcctaggtgacagagcgagactccgtctcaaaaaaaaaaaaaaagagttagttacacactgcagaaatctaaacaatctcaaaagtagactgggactttataatcaaggtaaaggtgaagtgatgtttaccaatataagaaatgaataggccaggcgcggtggctcacgcctgtaatcccagcactttgggaggccgaggcaggaggatcacaaggtcaggagatcaagaccaccctggctaacacagtgaaaccccgtctctactaaaactacaaaaaaattagccgggcgtggtggcaggcgcctgaagtcccagctactcgggaggctgaggcaggagaatggcatgagcgcgggaggtggagcatgcagtgagctgagattgcgccactgcactccaacctgggtgacacagcgagaccccgcctcaaaaaaaaaaaaaaaaaagaaatgtatgcaaccatttttttcaactcctgaaaatagtcagataataactgtagttattctgataaagttcctttagccaacaggttgaagcacattcccagggaataacatgtttataagattttctaacaattgcatatgttaaatcttctctttaaaaataatcctggccaggtgcggtggctcatacctgtaatcccagcactttaggaggccgaggcaggtggatcacttgaggtcaagagttcaagatcagccagaccaacatggagaaaccctgtctctactaaaactacaaaattagccaggtgtggtggtgcatgcctgtaatcccagctactcgggaggctgaggcaggagaatcacttgaacctgggaggcggaggttgtggtgagccgagatggcgccattgcactccagcctgggcaacaagagcaaaacttcatctaaaaaacaggaaaaaataaaataaaataaataaaaataaaaataatcctaggccaagctggctacagtagctcacacctgtaatcccagctactcaggaggctgaaacaggaggatcacttgagcccaggagtttgagaccagcctgggcaacacagtcagactgtgtctctaaagaaaaaaatcgtcatcatcctaggccagtccagacaacatagcaagacctccaactctaaaagaaaatgaaataaaaaattttaaaagtcaatttaattagaggtctcaagtaattccagaagatacagtctcacaaatcaaatactgagaaaggaagacacctttcaagataatcacactattattttaactgtaggaaaatgtattaaatgaagacagcttttgctagctgctgaaacatactagtaagaacaggaaacgatgctcccaccatgctcagcagtagccagaaatttactgaggtctttgtatttagccttaagtataagacacctaggaaacttcaaaatcatcacttaagccactttaaacccacagtctatacaaaccctttttcttttgttacattttatactaaacacactttaatcagactgacataagtgatttaaaagtaacttttataattcccttttacaagaaaaaaagaaacaatgtttccagatactaagttccttaagagacagcaatcatttattatagatttacagtactacaatttcaaatagtaccagaatctttttttttttttctttgagacagtggcacaatcacagctcacggtagcctcgacctcctgggctaaagcaatcctcccacctcagcctcccaagtaggtgggactagaaactcatgacaccatgtccagcttttttttttttttttttgagacagagtcttgctctgtcacccaggctggagtgcagtggtgtgatcttggctcactgcaacctctgcctccagggttcaagcaattctcctgcctcagcctcccaaatagctgggattacaggcatgcaccaccatgcccagctaatttttatatttttagtagagatggagtttcaccaggttggtcaggctggtctcgaattcctgatctcggtgatctgacagcctcggcctcccaaagtgctgggattacaggtgtaagccaccatgcccagccaatttttttattttttgtagaaacgaggtctcactatgttacccaggctggtctccaactcctgggctcaggtgatccacccacctccctgccttggtctcccaaagcaccaccatgcctggcccaaaatcttgtaattgcttaatactgtatatacattcttataatgatatgatatttcccatatttgtgtagaagatgcatgtggttcttctccaccccctcaagtacttaaaactatcacattggcagagtacaacctttaaatgtttctggcatcctccctcctcccattaaaaaaaaaattaaaataaaaatatgtatatacacgcccatacacactacaacagagggaaaaaagcaactcattgttcaactggtgttcttataagaatcagttcttaaattccaactgtgtagtaaaaggtaagcaagctataagctaccttttaacctatcctttctctatatacgttccatttacattgtacttgccctccaatctatgcaaacagtcacaaagattagattatgtttgctggcttatcatttcaactagtaacaaattcttaaggtgtgaatacaagatatggagaaaaaatgatgatgcacagctatgctgaaatttcgtattgttcaacttgaaatacgtttacagcctaatgggagtacactagaaaatgtagaaagagagcaggcacggtggctcacacctgtaatcccagcactttgggagacagaggtgaatggatcacaaggtcaggagttcaagaccagcctggccaacaaggtgaaaccccgcctctactaaaaatacaaaaaaaaaaaattacctgggtgtggtggcacatgcctgtaatcccatctactcaggaggctgaggcaggataatccaggtggcggaggttgcagtgagctgagatcgcaccattgcactccagcctgggggacagagcgagactccgtctcaaaaaaaaaaaaaaagaaaagaaaaaaaagaaaatgtagaaagagagccactccactgcagagcaattaattctatctccactaatatttttctaaatattcactgaaacagttttaaaaataatttcctgaactttaaccctcccaacatcttcaaaaggcaaaaattaccccctcagagggacacagctggtagtgccaatacaaaagatctttgtcttcccattcttagtccatagcttttttcatgacaccagcctctcttaagataaatatctgtgaaggatcaactttttaaaatacacacattctagctgggcacggtggctcacatctgtaatcccagaactttgggaggctgaggcggaggtatcacctgaggtcaggagtttgagaccagcctggccaacacggtgaaacccgtctctactaaaaatacaaaaattagccaggcatagtggcatgcacctgtaatcccagctacatgggaggctgaggcaggagaatcgcctgaacccgggaggtggagattgcagtgagccaagatggtgccaactgcactccaggctgggcaacagagcaagatgccgtctcaaaaaaaaaaaatatatatattcttaaaaataaagacacttagagaggaatctaaaacacactggttctatttttaacttcaccaatgctaagacagcgggtgtttttttttttttttttttgaaaaagaaaagggaacaaatttcacataggagaatagtttttgaaatctttgcacaacagggtggccatagtaaataatgattatttatttgcaaagagaagacagagataacaatagcaataataataatgtatttcaaacaattaagagtaaatttcaaatgcctcaccacaaaatataagtaagcaaagtaaggcgatagtatgttaattagtatgatttaatcatactacattacacacatatatataaacattacgttgtaccctatgtgtacaattatgatttctgaattaatattagagtggggagaacaataatgattaatttttacttcttcagtaagattacaatgaaaatgtagagagcactagcattatagtaactatacgataggccactttaaataaatggcatcttttacaaaatttttagtcaataagttgattacgacatacttacgaactatttgctattaagtgtaagttaatttataattttagtattttcaaaaaaggaacatattaaaatcctatcaatatttcaaataatgacaaaattaatcatttttaatagaatccttactcaggtcctccaaaaacaatataaactatgacttaaggtaaattcctttaaatctgactaatgaataaatgttaaatctcaaatttcatagtcccagtgctggaaaatctatatttttatttttcttcacgtttatacaaagaatgtacagacaggcaagaaatgtaatcaacctttttaggaaagaatcccaggatttgttttcttttcaattaaatatatatgaattctgggggatactggtgatcatctctggatctttttactcatctaatgagaaaagagtctcattatacaaagaggatagtcaaaaagcctaatgatttcctcacataagtaggtttttctgtctggcaaatctgaagaagtcaacatagaatctgtcattaatgcattgaatctgaacttccactattcaaatcaaattaggacctggaaataaagtgttaacacttcagacaagaaattccagggtttgtatcatcaggaatataaaccagggacactctcaagaggctgaagagcaagagtcatgcactgcttcagagaattaaatactccaagatgaaagttaaaatttcaaacacacatatcacacatacacatcttttaacatcaggttgaaatgctaaagggaacagagtaaaggtatgtttttaattaataaatttaaatgagagaaaactttaaattcaaagagcttcagtaaaaaaaaaaaagaaaatattagcaatgttatcaaatgtggacgaaaagctaatatatgtcactatgtaatccaagacatattcattagtggcgccttttttctgggctattaatatattagatgccatccaaaaacaaatatctagtaaatattaagtttaacgacttcttaaaaacctgtaggttcccaaagacatatacatgtatgtgcagtgaggccactgctaagcctctaataatattcttgtagactactaaagttctctatgatgataaaaagggtaataaaaaaaaaatctagtgtctccccttaataaacaaagaacgagcataacttaggaagttcggtaacaaaaacaatctataattctggtaccagaaatccctctgaggctgggcgaggtggcttacacctgtaatcccagcactttgggaagccaaggcaggggggatcacctgaggtccgaagatgaagaacatcctggctaacagggtgaaaccctgtctctactaaaaatacaaaaaattagccaggcgagtggcacatgcctgtaatcccacctacttaggaggctgaggcaggagaatcacttgaacccaggaggtagaggttgcgtgagcctagatcgtgcccttgcactccagcctgggcaaaaagagcaaaactccatctcaaaaaaaaaaaaaaagcaacaagtccctctgaaaaaagttttaaataataaacaaaagtctataacaggtttttaaataactataaagtcctacacatattacatgaataccaacataataatatgaatatgaatatcaacagggtatccaattccttttttgaaaaggtctgaaaattaatatgaaagaagtaattctgtatgttcagaaatctgttgattctaggccaggtatgatggctcacacctgtgttatcccagcactttgggatttacaaaatgggatttcctcctcacctaaggtcaggagttcaagaccagcctggccaagatggtgaaaccccatctctactaaaaactacaaaaattagccaggcgtggtggcagtcgcctgtaatcccagctactcaggaggctgaggtaggagaatcacttgaacccgggcggcagagtttgcagtgagccaagatctcaccactgcactccagcctgggtgacaaataaaataaaataaagaaatctgttgattctggaatatttgcgtttcattccccaatcagcaggtatccaattggcaagaagtgtgtttccccaggcattctaatgggatgccagaaggctcaacccagtgcttaaatttttagtgattacattgcttaaataatgtagacagatacaatagattcaagataaatcaatatgtaaaaagactttaaatatgtgcacaaggtatttttcaagatggataaaacatatgaatcttaaattaccatctttttttttttttccctgagacggaggtttttttcctcttgttgcccaggatggagtgcaacaacagcatcatctccactcactgcaacctctgcctcccaagttcaagcaattctcctgcctcagcctcctgaatagctgggactacaggcgtgtgccaccatgcccagctaatttttgtatattttttagtcgagatggggtttcaccatgttggccaggatggtcttgatcccttgacctcatgagccgcccacctcggcctcccaaagtgctgagattacaggtatgagccactgcgcgtggccaaattaccgtattctttcttctgtaaaaagatctggccactccagtccattacgatactgtccttttgagcctgctcaatcagtttgtttaagccctgcctcaggctaacagggctgccataagaggaatgctttccccaaaaacacatcctacaagaacagtgttgtaatctctagagttaacacttaatataaaaacacaaacttgcaggatctcgttttcatgaatttacttgaggaaagacacaaatatagagtggatgctatttattgatgcacttagtaggaaagaaggggatagcaaaagtaacaattttaccagatccatgcacatatgcagattgtattttactagagatggcacacataaaaattccagatagtggtaaggatatgaaaaaaagtggcaggaatgggtgtgatagtgaaaaagtcactgcatatctgtaccttgactgaggtcatggttacacaggtgtatacatttgtcaaaatttactgaatttaagacctatacaggccgggcgtggtggctcacgcctgtaatcccagcactttgggaggctgaggcggatgggtcacctgaggtcaggagttccagaccagcctggccaacatggtgaaaccccatctctactaaaagtacaaaaactagccaggcgtggtggcaggcatctgtaatcacagctactcagggggctgaggcaggagaatctcttgaacccgggaggcggaggttgcggtgagccatgatcgcaccattgcactccagcctgggagataagagcgagacttcacctcaaaagaaaaaaagaaaaaaaaaaaaaccaccaccacctatacatacataaattttatctcaaagaagcaccacaatagaattcaaaaacgaaatcaatttaaaaaggaaaagtacactcgattaatacaagatggaaaagaataacattataaaaccaagtatctctgcatgagcgaactccacaagaatttagtaagttatactctacattaaaaaaaaaacaaaaaacaaaaatacagaataaggaagcatttcctatacatatgaaaccacaaaatttctgtaatctttactgttaggcctctatacaaggggaagtatgtttcattttatagttccaaaaataaaatgggctctgaaaaacttcaagatagtcaaagacaggtaaccaaaatgatgacaatgtgaaaagattaacaaacagctcctctaaatcattaagggtggtccaatgaaaggagcctcagggatttgttttaggtgattaggataaggaacaagagccagataacaaaggcagaaaatcctaaagaatttaacaattcaatgttcccaaaagacaccatggaccacactccattttatatgacacttaaatgacattccatacatgtgtctaacatgaagattgagcagataaaaagtatcactttagtaatcatcctcaatcaacaccagataacaaatgaggggcttttgcttatggaaattctcacatattgagctgaacacttttaccttaattaattaattaatttatttattttttgagacagagtttcgctcctgctgcccaggctggagtgcaatggctcgatctcggctcaccacaacctccgtctcccggattcaagtgattctcctgcctcagcctcccaagtagctgggattacaggcatatgccaccacgcccggctaatttttgtatttttagtagacacggggtttctccacgttggtcaggctggtctctcccgacctcaggtgatccacccaccttggcctcccaaagtgctgggattacaggtgtgagccaccatacacagccttatcttaatttaaattgttaaatataaacataatactcaggtccttagcagccccttctctatattgttccaattaactgcctcccactgcgatctctcttgcacgtgtgtgcacgcactctaacacacacactttttttttttttagacggagtcttgctcttgttgcccaggctggagtgcaacggtgcaatctcagctcaccacaacctcggcctcctaggttccagcaattctcctgcctcagcctcccgagtagctgggaatacaggcatgcaccaccacactcggctaattttgtatttttagtagagacggggtttctccatgttggtcaggctagtctcgaactcccgacctcaggagatccacccacctcagcctcccaaactgctgggattacaggcatgagccaccatggccagcccacacactttttcaagaagcaactagatttaatcttcctaaattgtgccactttccggcaggtaaaatttcaatgattccctaaagtcactccaaatacacttaaactgggccagggtggtggctcacgcctgtaatcccagcactttgggaggccgagatgggtggatcacctgaggtcatgagttcaagacaagcctgaccaacatggtgaaaccccgtctctagtaaatacaaaaaattagccaggtgtggtggtgcgtgcctgtaatccctagagctacttgggaggctgaggaaggagaactgcttgaacccgggaggcggaggttgcagtgagccaaaatggcaccattgtgctccagcctgggcaacaagagcaaaaactctgtctccaaaaacaaacaaacaaacaaacaaaaaaacacctgaactatgattaaaggtctacaatagggttcccaacccagtgcttcagcttcacctcttatttatattactcctcataagtacccaattcctctacacactgacaatttgcacctggccttatcctaattttcttctattttgggggggattctcccccaaattcacagtgaaaactgtacagaccaattccatcaccccattttccctcctctgaccctccaagtttttgtttttgtttttgagacagtctcgctctgtcacccaaattggagtgcaatggcatgatcttggctcactgcaacctccacctcctgggttcaagcgattctcctgcctcagcctcccaagtagctgggattacaggcacccaccactgcatccagctaatttttgtatttttagtagagatggggtttcaccatgttggcctgtaaccccagcactttgggaggtcaaggcgggcagatcacctgaggttaggagtttaagaccagcctggccaacctggcgaaaccctgtcaatcatgccactgcactccagcctaagtgacagagcaagactgtctcaaaaaaaaaagaaaggaaggaaggaaggaaggtatactgagaattacatcacaaaatccacatgctctccccttcacaaagccctttacttttctcccataataacttatagcctccttgaagacagtggttttacaagtcataaaaatcctggccgtggcccagtgcagtagcttgtgcctgtaatcccagcactttgggaggccaagacaggcagatcacttgaggtcagaagttcgagaccagcctggtcgacatggcgaaaccccgtctctactaaaaatacaaaaattacccaggagtagtggcacatgcctgtaatcccagctacttgggaggctgaggcaggagaatcgcttgaacccaggaggccgaggttgcagtaagccaagattgcaccagtgcatttcagcctgggcaatacagtgagaccccatctcaaaaaaaaaaaaaaattatggccgggcacggtggctcacgcctgtaatcccagcactttgggaggccgaggcgggcggatcacaaggtcaggagatcgagaccatcctggctaacacggtgaaaccccatctctactaaaaatacaaaaaattagccaggcgtggtggcgggcacctgcaatcccagctactcgggaggctgaggcaggagaatggagtgaacccaggaggtggagctggcagtgagccgagattgcaccactgcactctagcctgggcaacagagcaacactccatcttaaaaaaaaaaaaaaaaaaaatttatacacacacacacacacacacacacatctccctagaagcatcaatatttactgaattagagtattttattacctgttataaaaaacaaacaaaaaaaccttccattatactaatttataaaggaataaaaacaaaatgggttggggagtccaggcacggtgtctcactcctgtaatcccagcactttgagaagcacaaggtgggaacttgaggtcaggagttcgagaccagcctggccaacatggcgaaacccggtctctaataaaaaattagccaggcctggtgacatgcacctgtagtcccagctactcgggaggcagaggcacgtgaatcacttgaacccaggaggtggaggttgtactgagccaagatcgtgccactgcactccagcctgggagacagagtgaaactatgtctttaaaaaaaaggcggggtgcagtggcacacacctgtaatcccagcactttgggaggccgaggcaggtggatcacctaaggtcaggagttcatgaccagcctaacatggtgaaaccccgtctctactaaatataaaaaaattagccgggtgtggtggcacatgcctgtaatctgatctacttgggaggctgagacaggaaaacagcttgtacctgggaggcggaggatgcagtgagccaagattgcaccattgcgctccagcctggacaacaagagcaaaactccgtctcaaaaaaaaaaaaaaaaaaagttggggtgaggggaaggttcaacttaaagatacgattactaactgtttcataaggaatgacttatttcatactggagtaggagtttgacaccagcatgggcaacatggggaggccccatctctacaaaaaaataaaaataaaaaattagcgtgccaagcatggtgggtcacacctgtaatccttgcactttgggaggccaaggaggaaggatcacttgagcctaggtattcaagaccagtccaggcagcatggcaaaaccccgtctctacagaaaacaacaaaaaaaaagtagctgggggtggtgacatgcacctgtggtcccagctattgggagggtgaggtaggaggacttattgagcctggaagatggaggctgcagtgagctgagatggttccactgcactccaacctgggcactggagtgagactctgtttcagaaaaagagagaggaggccaggcatggtggttcatgcctggaatcccagcactttgggaggccaaagcgggtggatcacctgaggtcagcagttcaagaccagcctggccaacatggtgaaatcccatctccactaaaaacagaaaaattagccgggcatagtggcatgcacctgtattcccagctacttggaaggctgagacaggagaatcacttgaaccaggaggtggaggttgcaagtgagctgagattgtgccactatactccagcctgggcaacaaagtaaaactctgtctcaaaaaaaaaaaaaaaaaagagagagagagagagaggaaaaataaataaattagtcaggtgtggtggtatgcacctgtggtcccagctactcaggaggctaaggcgggaggattcccagagcccaggaagtcaaggctgcagtgagcagtgattgcaccactgcactccagcctgggcaacagagcaagagcatatctcaaaaaagaggaaagaaaagaaaagaaaaacataaaaacaaacgttcctttagttttaatttttattttttagtttattatggccgttttactctcccccaagtaaaacagccatgcacaatttgctgaaattttccttagtgtactttgaaatctgtggaacagaactggcaatcgctaaattctatttgactctagttccatttaatattagactggtgtgaaagtaactgcggtttttgccaaaaccgcaattacttttgcacccacctaataagtataaaatatgtaacttcacttaattttatcctttatgtatttccctatattatgtacctatggacatcaaacttagtacagactgataaaaggctgaacagacaactctggtttcaaaaatccagcttctcacaacatcagacatactagtatacagcttttctaatttcacaacacatttccattttttggtctttcacaatagagaagatgtgtatacttttgaatactctgatctgtctacaatctaccaaaattggaaggtgtttttattatacagtttcatccttttagaaatatacaaagatcctaagtttgggcacagtaagacactcaatatagatctactactaaacaagtaagaccaagtacataattaatgtcctaacacccccagtggagaagtaaaatctacttgttttctgttgacttgaatgccttctcttctttgttgaattaatcaatctacttgactccaatgtcaaattaatcaatgtcactttagaatattaaaatgtacaattatgaattacacatttaaaacacatcattctgatctctgtcttgattgatactagaagattatcttccaaactaaggtggaaaaaatgacagactttagctattggcaatgataggtcatttttttagggaagaggagtaaagagggcaacctccataggtcagatatccctttgttctaagaagccaccacctctgtttcttcatatgaaaaaaaccagaggcatccagtggttcccaaaaccttctcaactttacgcttgaggaacccacagatttcaaataatacaactgacctaagaccactcatttgtttaaccattctttttttaattttttatttttttttttgagaaggagtcttgctctgttgcccaggctggagtgcagtggtgtgatgtcgctcactacaacctccgcctctcaggttcaagtgattctcctgcctcagcctcccgagtaactgggattacaggcatgcaccaccacatcctgctaatttatttatttttttttttttttggagagacgggggtttcaccatgtcggttggctaggctggtctcgaactcctgacctcaggtgatccaccaacctcagcctcccaaagtgctgggattacaggcgtgagccactgcccccagcctgcttaaccattcttaaatgtcgggtgcggtggctcacacctataatctcaacactttgggaggctgaaggtgggcagattgcttgagttcaggggttcaagaccagcctgggcaacgtggtgaaaaccccatctctataaaaaatacaaaaatgagccgggctgttggcaagcgcctgtagccccagctacttgtggatgctgaggcaggaggcttgagcctgggaggtcgagactgcagtaagccaagtatctgtgccgctgcactccagcctgggtgaccacagcaagaccctgtctcaaaaaaattgacagaagagttgactgagagcacagtgaatgaaaaggaagactataagccagtgccatataaatgcttactgttggaggtatgcttctatggaacacgggtttgctctcttgccatatgacattcacgtattcagccacctggaacacttcctgtctgtatgtgtgaagtatcatgtgtggtcaaaattgactcaacagtcattttccacaccaactggcaaactaacactaaaagaaatcaacaagtattgctttttcaaaagcctaaatcggctgagtgcggtgacttacacctgtaatcccagcactttgggaggccaaagcaggcggatcacctgagtcaggagtccaagaacaggccggccaacatggtggaatcccgtctctactaaaaatacaaaaattagctggacgcctgtaatcccagctactcaggaggctgaggcaggagaatttttccctgtaagcgggaggcagaggctgcagtgagtcgagattacaccactgcactccagcctgggagacagagcaagactccatctcaggaagacaaaaaaaaaagcctacatcaaggaaaacagaaccaaaacaccagggacaaaatggtacataagaggcaaaaaaaattttcaccaaaattattcagatgaaccataataaatgtgcctgcatctgaagatgttctaaaccttcatttaagcaagaagcaagatcaagatccgttccgtcagttacctggagtctgtcatctttctgaataggggacagaatcacctcaaatttaactaataaaaatttatgacttggcaaacaccccaggtatttttattgactaacaaatcagctatgacaatcttagcaacaaatcaagttatgctatggggtatgtccacactttcctgttccctctacaacaggagaaaatcaaatctttccaacatcctaacaaactgttactccctgtaaccaaatgtatcacagtatcgtctaccaaggcgttacatcctgaaactttcctacaaaaagcacagcttcaaagaaaccttgcaagctttcttgtaagctcctcccttcccacatcgcccctccccagagccaagaaataaagcacttgaaagaaacaacatggataatatttattaatagcttatgtacatattccataactacataagccatttggcttcatacctgtcagcaatgaagtcagctggccctagcacgtggctgcgactcttctctatttatttagaactacaaactacaatttacactttacaaaagctgtaggactatttgggaaggcactttattcttctaaaaggttactaaattctcttaaatacttatactgatcacaatactgaaaaataatagaaaatccattgtcattcatttaccacctgatttgttagatgccagataatcaaatttcacacatttcaataaaaaggcaaaactaagcatgtcaatcataggaagaaaaatacttaactaattttatttaaagcactcacaaactcttaagtggtacaagacaagtcaacgctgtttatcgaacaatattttttttttacgactaaacatctcaattctagactcaggcactaattattaaagtcatctagttatatacaccaattctcaacagacacagttttttttggaaaggcatattaaacagactaagatgtgtactacccattagccaaagataattttattgatttttctaatgagtcttcaaatgttacattctaacatcttagcaaattatttccaaatactgctggaattacatgtaactatcaggaaacaaaagggcttctcaacaacttgtgcgttctacattatctggccagtttccggacaattataatacaattgtgctccaaagtaggagagttccatgaatcaattgcccctaaaatatatttctgtatatttaaggagttctaagcattgggttaaattccaaacagactctgaatacaagcatttatttagtaagagaggttagaataaatcaatcctaaattaggcacagctgccctccccccattgatcaaaaagacaggaaattacatttatttaaaaagttaatgttcctaatatattcaaatctaactaagccccaaaacggtctgagatcaaatcctccataaaagaggaaattctctagacttctaagtgggtgcccaaagagttcactcaagtgtccaggtatgaattacgattcaccagagtaaccggccttgcacttagggaaaacttccatcgcccaagaccagagtgggtcgatcccatcaacagtcacacaatctcatctcatgctccactaatgaatgttctgcctaaagtcagagcaatgccttggctggagttttgttttggttttttcaatattaccacgtgggggtcacagaaagggaacagaggttacaagagctctcacgtggcggctgaaagactggggaaccgagaaagtgaatgagtaacagggagggtcctggactctcaggatctcccaactcggggtcagggggaggcggtaagtggaatgcccccccaccacccccgcctctttctcacctcctggtcccgaccctaggccagtgccaccgccgggagccccgggtctcggcttcagccccaggctgaacatgcagggaggggagaggcacttaggcctcgcctccccgtggccttcctcccccagccggggcggaggagaaccaggaagccgcgcccggctccggtgggtggagggcctaggccgcgcctcccagccccgcggccctaggcctcggcccgcccgaggcggagcccgggaggtcggggcggggtcccgggccggtcacccacctgggttgccagtcattccagctccgcgaatagttggtgccgccgctgctcagccgagaccccggggctctgcggctcattaccttccccgacacgacatggccaagcgccgccgcccagagaagcgcgagtcgccgcccgaaccggccgctgccgacaccccgctccggcccggggctgaggaggaagccgaggaggaggaagagaaggaggaggaggaggaggaggaggaggaggcggcggcggagggcggggtaagaggacggccgttccgggttccgcctgagcccgcaacgcagaatgaggaggcgggagcggcgcggtgagagagaggcggatgaaggggcgccgacttctcttccagggccatgcgcggcccacgacgccggggccccggaggacgaggacgacgaggagcaggcggtggcggcagctccccacgctcacaaggccactgcttccccgcctcccggctccgcccgccgcgccgccactgtcgcacggcatgctgggagcgagaggcggggtcggccccgccgggcctggggagagaggcgggtcctgtcggcggggcggggccgagagaggcggggccgatagcaggccgccccgccccccacggccccaggctcttggacggcgaagaggtctgggcgtagtagtgacgaatcctaagacaagggatctccactactgcggccacacacttttctcccaaacgcttcccggaaagcaccggagggctgggcagtcaggtgtaaacaggcgtccaatcaaggacctgcagtgtgggtggtgggggctggtgccctggggtgcgagcgcacacaggcgtgcccttggtttcacgtgcgccagttttcccactttctacgggggggagtggaaagtgaaaatagtaagatcgagaggtggatatccaccttcccaacctccacctgaaatgtgcccatcgagtcctagcaccttttaccatttcttcccaatgaaaaaaactaaacgatgtaagggaagggagtacccacgaccaccaaaccctgtcctctgcaatgtgaaatgtgctttgaagtcctctcaccctgaggcttgcccgccttctgctggtgaaagaagctgggggctaggcgcggtgggtcacgcctgtaatcccagcactttgggaggccgaggtgggcggatcatctgaggtgaggagttccagaccagcctggccaacatggagaaaccccgcctctactaaaaatacaaaaattagccgggcatggtggaggacgcctgtaatcccagctacttgggaggctgaggcaggggaatcgcttgaacccagtaggccggggttgcagtgagccgagatcagaccattgcagtccagcctggacaacaagagtgaaactctgtctcaaaaaaataaaagagagagagagaaagcagggagggaagaaaaaggaaggaaggaaaggagggagggagggaaggagggaggaaggaaggaaaggagggaggaaggaaggaaggaaaggagggaggaaaggaaaggaaaggagaaaagaaagagaaggccgggcgcggtagatcacgcctgtaatcccagcactttgggaggccgaggcgggcagatctcgaggtcaggagatcgagaccatcctggctaacacggtgaaaccccgtctctactaaaaaatacaaaaaattagctgggcgtggtggcgggcgcctgtagtcccagctactccggaggctgaggcaggagaatagcgtgaacccgggaggcggagctcccagtgagcagagatcgctccactgcactccagcctgggcgacagagcaagactccgtctccaaaaaaaaaaaaaaaaaaaaaaagagaatcagctgggtagaggagacgtacctgaccatctaccccatgacatgtcccatgccccagggaaaaaaattccctaaaccatctgatgcataaagtgaatgcatacacattttttaaaaggtgggccaggatgctccttaaacaagtgtctaaaccttatctgcataaggagtcttaacctatcattttatgttgcaaagaaaacgtctttatatatcgcttgtgcaattaaaaattgtaaccaaaagtacttgaagattatgaggagttgacacctccacacacatgcatatcccctccaccttgggctccttgcttatggccaccaatccctcactaagggaggatcctgccagttctaaatgatggggactacaaaaattacccggcgtggtagcgcgtgcctgtggtcccaggaactcaggagggtgaggcaggaggatgacttgagtccagcaggtggaggctgcagtgacctatgatcccaccactgcactccagcctgggctgcggagggtagggagggagggaggagaagaaagagaaaaggcagggcaccatggatggctgactcctgtaatcccagcactttgggaggccgaggtgggtggatcacttgaggtcaagagaccagcctgacaaacatggtgaaaccccgtttctacaaaaaaatacaaaaattagccaggcatggtggcgcacacctgtagtcccagctatttggggaagctgaggcatgaggattgcttgaacccgggagccagaggttgcagtgagccgagatcgtgccactgaactccagcctgggtgacagagcaagactgtctcaaaaaaaaaaaaatcatttaggtgaagtgattcatgcctgtaattacagtgatgggaggctgagactggaagatccttgagcctgggagttataggccagcctgagcaacatagtgagacccccatctctacaaaaaaaaattaaatttttttttttcagacggagtttcactcttgtggcccaggctggagtgcaatggtgtgatctcagctcactgcaacctctgccttccaggttcaagtgagtctcctgcctcagcctcccaagtagctgagattacaggcacatgccaccatgcctggctaattttgtataaaaatttaaaaaattttaaaattagacaagttagaaattgcttgagcaactggacacaatctctggtactacctttctttttcttttttatttttttattttattattattatttcttgagaaggagtctcgctctgtcgcccaggctagagtgcagtggcgcaatcttggctcactgcaagctctgcctcccgggttcaagccattctcccgcctcagcctcccgagtagctgggattacaggcgcccgccaccaagcccggctaattttgttttttgtatttttagtggagacagggtttcaccgtgttagccaggatggtctcaatctcctgacctcgtgatccacccgcctcggcctcccaaagtgatgggattacaggcgtgagccaccgcgcctggccctctttttctttattggtcaaaatattatccaactaggcatatggatgtggaggcatgcctgtgatcccaattacttgggaggctgaggtgggagaatcgcttgagcccacgagtttcaggctgtggtgagccataatggtgccgctgcactccagcctgggcaacaggatgagaccatttcttaaggggacggaaaaaatcactctggctgtggcagatttccttaggatagattccgagaagtggagttattggggaaaaggctgttaatgattttaagtctttggatacagactgttaagttgctttccaggaagtttctgccaatgatagtctgatactttctgtgtcctcacaccaccctttgtcaacactgagtgttttttgagggttaattatttctatgggagaagttaaaaaaaaaaaaaagacaacaaagaaattgcttcaggtggggcatgctggctcacgcctgtaatcccagcactttgggaggctgagatgagagaatcacttaagcctaggaggtggaggttgcagtgagcctagatcgtgccactacactccagcctgggcaacagagtgagactccatttcaataaaattaatcaaatgaatcaaacgtgagcaactctcataacttccaacatttttttcttcttcctgttggtggttctgcctctctggctccattaggatttccctactccatttcagtcatgggaaccgagtttctgttcctgaaacacaccaagcctttctggcctctggatttttgtacttgctgttcccgccatctggaatgccttccctgcatttgttcccatcagggttgggactagcaaagtgacaggggatggagttgctgagggtgcaaaatttaaggaggcacctactcccagggtcatgcaaaagccaactttgcatttgcacaatcctgtgagtgagtccctccttaaatttgaggctgtactgtaatcccagctactcaggaagctggggcaggagaattgcttgaacctgggaggcagaggttgcagtgggccgagatcctgcctttgcactccagcctgggcaacagggcgagaatccgtctaaaaaaatgaggctctagacaccacatttgccctactctggcccctgccctgattttcctggcctgtctcatctccagacaggtttgctttgacctccctgcccataaaagttggccagtgccctttccaggtactctgtcatataccctatttctttccttggtagtacccagcaccatctgcaagtattgggtttctttgcacatttagcatctgtccaacccttaggatatcagctttgcaagagcaaaggtcacgtctatctcagcctacctcctccatactcagcacacagcacagcacctgaccataggaagcacgcaagaaatgggaggaatgaaatggaaattatctaaaataaggatcaagattgatacagaagtattcatctcagctttacttattaatagcaaaacaaaaacaaaacacctggatattatactaattctcaacaataggaaactgattaggatgcagtacattcagagctgaaattttctgcagccattacaaattacatttgtgaagatttttttttttttttttttttttttttttgagacggagttctgctcttgttgcccaggctggagggcaatgtctcgatctcggctcactgcaccctccgcctcctgggttcaagcaattggtctgtcattttcagacccaacagaaacagaggtgctcctgccaggcccccggggactgcctccaggagtcatttgtaatgacagggtgcgttctgcgcacagtttcagagtctgtccaaagggccaatgctggggctgggcagaaacgatccaaggcctgtgagctgtgcagctttataggcaaatgaagatcgtttacccagaattgcctgctggagacagcatagaggaagtggcggcaacttcaccagttccaggaagcccaggcagcctggtcccccagggtgcacctggcacagcagttcgcatggggccagagagcggcagctgaccgctgcaactacagctggcctgacaccgggcacaggtaccagcccagcccagtcccgcccagcgcagcctgcggcccctagccgaaccagcacctggcaaacctgacacccagccttggagcttgggcccccctctgcagctggctggggctcctgagacagcttctttgtcggaatccactcagtacacacacggtcccaaacttagtggctgcccagtgaacatggggcttagtagaaccagtaccttcctccctggccccttcaagtctaaatatcccctgctctgagtacaagcctccaccttctccactgatagacagcccccaccatctccaccgacagacagcccccaccttctccaccgacagacagcccccgccatcttcaccgacagacagcccccaccatctccaccggcagacagcccccaccatctccactgacagacagcccccaccttctccaccgacagacagcccccaccatcttcaccgacagacagcccccaccatctccaccaatagacagcgcccaccttctccactgatagacagcccccaccatctcccgtgtcatcccctggggggacttgtaaaagcagtggtcggggagcgggatggaaacccagagcttctgatcaggcaggtcgggggagagggagacaacacatctgcacagaacaaggtcccagggaggccggcgctgctggtccagggagcaccccccagcacaggcgcgtgcttccctgatggacacgtcaccacccctgggctccagaaaatgaatgtctgacccagtgacccctgtcctcacccaaggccaacctcaccccagaatgggctggaatgctgagcctgcccatgccagctccagatccacccacctccccaccattgctggccacagagagaggtcaaagtggtccagaaaccccaaggaaaatgaagcagttccggggcagggaagcaaaggcagtgtttccattttttttttttttttttttttttttttttgagacaaagtctcgctcttgtcgcccaggctggagtgcaatggtgcgatcttggctcactgcaacctccacctcctgagttcaagccattctctcacctctacctcccgagtagctgcagcctctgcctccggggatcaagtgattctcctgccccctgcctcagcctcctgcctcagtagctgggattaccgacacctgccaccacgcccgcctaatttttgtatttttagtagagacaagggttcaccatgttggccgggctggtctcgaactcctgacctcaggcgatccgccaaccttggcctcccgaagtgttgggattacaggcgtgagccaccgtgcctggccaggatggtctgcttataatggctcaattttgatgtccagtctctgcagagcacaaggcccccgctttgggccagacatacagatgtccctgggcaagaacagagatgatcccaaggccctggccccacctgtctgctcagtgttgaatcaggtttctgtgaaaacaaattactaacaggctggtgtcacattttcaaattctgtcaccagccgttgaacacatgtctttgtacttttttccatttttaaccggggctgagttacgcccaaccacactgtcctggctggcacgggggaggaggtgtcagctgctgtccagaatggggctgacacattcattttaaacaggccaggaagatgcagatttggcaagctctgaaatttgccgacaccccaagtcaagggtaagcaggagaaccggaaaagggcagcttctcatgtagtcaggttctcctgatgcaagcgtcctggtggatttgggtttcccaagggtcctgactccaggagacccccaggaccgacaggaagggccacccctccctctgaaactctgaagccaggccacccagtgctgaaatgctgtgtgaactcgggcaagttcctttgcagggactgagcctccctttcatgtctccaacagactggaacactgcctcccgttgcatgggcgaaatacctcgcggacatgtcttacggcgccccatgaaagcatcaccattaatctgaccagtcactgcagcatgagtatcttcagggcacagatgaagccatgggcaccagtgataaggagttgccactgctggctaagtgcggagcctcacacatctgtggcccagaaacccataccccactccaaaccctctatagctccaacagttatgctaacaagaaaaaggagtgaaaacccgctccagtcacggtattgtggaggtggaaggacacttgtggcagccaatccaacacctccattttatagctggggtaaacatagttcagagaggttgtcccacttgctgaaagtcacacagcagttcctgggcggcaaagtgaggacatccaggtctcctaaatctcaccctcgtgctctgcccacttaactaggcttttcaatcctggctgtcaaagagaagcaccaagtccacttgggctcctggccagcatccaggccagtccaactcaacagcaagcggaagcaaataccacacaatgaacttgttgaacagactctgtgctcaggcttaaccagtgcacagcctgtacacccgacaggcggatgcagctgttccaaactaaggccagggcctctccccaatcccgatgggctctgcaggtgcagtgatggaagaatccctggtgacggggagcccttagctctgagcaggacctgaagccatctcagggcttgcaccggtccagatgctgctgcacaagtgctccaggggctcctgccctgccctcctcacttgccccctcacctgtcagggatgtttgattcctggctggcccctcccctacctgacccctgccaaagacctacgccaccccaggctcccagctctgaagcaaacaaccagagaagtcaagcgcctggctccgggccacacagcttgagggactcagagctccagggacagtgcccgggccctgctcaggccttctgcagaggctctgggctcttccagttgactcagctcacagggcccctacacagtaccaggtgaagacacagccccaagaaccctcagggtctgaagccacacatgtgagccgtgggcagaatcctgcattggcctccagcagctcgagagcacagggacaaagctggactggccccggggtcaccgtggccttggttttgtagcagctgcagtttgagcacgtacaccaaaaataaaattctaagccccgtaactgactgaagggaccactcctattggccaaagggatattccaaagttaacctgaaaaacgagctcaggtcatgatgggaagaggggtcacacaggccttgttataccccctccctctggaattcaggtacagctgaccagcactaacattcaaacacagatcttggcctggctcagtgactcatgcctgtaatcccagcactttgggaggctgaggtgggcagatcatgaggtcaggagttcgagaccagcccgaccaacatggagaaaccccatctctactaaaaatacaaaattagccaggcatggtggcggcaggcacctgcaatcccagctacttgggaggctgaggcaggagaatctcttgaacccggttgcagtgagccgagatcatgccactgcactccagcctgggtgacaaaaacaaaacaaaacaaaacacaatattggtctccacaacctcctgtcttacccagatactcctttctattgattccaggtctttagctaataactctttcaaccaattgtgaatcagaaaatattttgccaggcacggtggctcatgcctgtaatcccagcactttgggaagccaaggtgggtggatcacctgagatcaggagttcaaaaccagcctgaccaacatggtgaaacccccgtctctactaaaaacacaaaattagctgggcatggtggtgcatgcctgtagtcccagctactcaggaagctaaggcaggagaatcacttgaacccaggaggcggaggttgcaatgaactgagatcatgccactgcactccagcctgagtaacaaaagcatctcaaaaaaaaaaatatatatatatgtatatatatgtgtatatatatgtatatgtgtatatatatgtgtatatatgtgtatatatatgtgtgtatacatatatatatatatataaaaagaaaaaagaaatctttgaacccacttgtgaccaggaagcccatccctgccttggagttgtcccgcctttcttggcagaaccaacaaatacctttcatgtactgactgatgtctgcctgtaacttctgtccttgtacaaggtatgaactccagctgtggcccagcccctggggcacatgtcctcagggcctccaggccttggtcctcacatttgactccggataaacctcttcaaatattttacagactctggctttctcgttaacaagcagctcacacatatagtgtctcagcagtgacagatgctggcccaccccgaggtcaggatgactcagcagggattgagtttgcgggcgtcatgctccaaggcccggaataggaggttggtgctcattcctcacatagtgggcaaatcctagggcaggggagggggggcaatgccagagaatggtccccacctggggcggtctgacggccagagatgcagagaaagagacgcctcccacgctcctggagggcaggtgctgtggccaccccggagggtccgccttccagagggagagttcaggatttggccacaatcagggaaggaggcactgggggggggccctcctgttggaaaagggcagcggcaggaagggggtgctgccacagggcctctggggagcgcgcgggcacacagtaccaatctgcgtgcatacacatgccctgtccctgcagatgggccacgcaaggcctgcccatggccagccatccaggtgatgctccagggagggccaggcctacttgggggcagaaccctgtggctgtccaggatacctggatgtgagtctgggaaggatggagaagggtggaggagtgcgaagggcccctaggggttgctggggaacacagatgagcctctgacccacctgtgtccttacctgggccgactgggccacccagtcttgctgacacctccccagacccctggcacccaccagactccccaggcgtggctgtgtgctccgctatgcctgatgacaaacagtggcctcagtgtagaggtgggcactgtggcccctggctcctggctcgctcctgcctcagtttccccagctctaaattggggattatcactggcttcaaaggctggagtggaaagtggtggccaagaggtgccaagaggtggtgcaagcatgtgccctaccttggacacccctctacagggggtggctctcaccctggcctgggccctcgggggtctgcgcagcccactcttctgtgtgaaggcggctggtacactttcctgggcaagattctgcacattctgctggattatgaaagaggtctgtgacccaagaaaaaagggtcagaagtgcccgttaggctctcctgtgtggctcaggtcatgtgcttctgtgaactccccctacggccttgccccgaatcccgtgatgcagcgtgacctgcccaggcgccggcggcactttcatgtctggctgggaaagtcggatttcagcactaatcactggctgccgcctgcaatgagcccacggcttgagctctggggcccacccagctccttaaacatgcagaacctttgctagctgagccagggtcccagctgtgcggggttggggatggaggggtgcagggatcccaaaacccaacccggggccaggttttacacaggcctggactgagaagtggggctacaggctacaggtgcttgataccctgggggggccctggaacaggcctggactgagaagcggggctacaggttacaggtgctggataccccaggggggtgctggacaccccaggggggcagatagaggcagccaggcagcctgaagaccctggggcaaaacacacacaggccccctctgctctctggtcactgctaactggccaactggcctttgagtccactgaccacagctaagcccacagccatcaaaacccaccccttacacccttcaccctttagggaggggctcagagacagttgtggcgattcctacttccacccacagccccccgaccctgggcctgtgccgagtgtgggtgggtgacatcatctcgcacccagagctccagactaaaggaaaccctggctcctgtctctggctcttccctccctctctttgttcccttgctccttccttctttttgccaaaggagaagatagtgaggctgagggctgctcaacgtgcacagtgagcaggagatacaagcatgtggagggacggtcacagcccatgcaactggcaccttcacacgcggaggcctgcgattcccagacacctggcgctggggcaaatcccattccacagccagaaacaggctcggcggggccaggtggatttctcaaagccttggttgcttttggcctgatgctagctggacaatgtctcagctcacaggttcctaaacgcacacccgcccacaccaatctgctgaggagtgacagccatggggaggagacccacctcactccagggaccctggcaccgtctcccatgaggccaggtgtcctcagccacccgcagccagagtcccgcgagaccgacggacggcctgcccctgcgtgacggcacgcctgggactgtcccagcaggctcccatgcttcacccaactgcgacagggaaacaggagggggctacttctgctttcaaggcatggaggagctgtctgcaggccacttcccgaacacctatgcgcttggggaactgactgagactgagccggggtatcttctccacgatgcggtgagcccatcaggcccttcttctgagagcacctccctggaggtggaagcccctgaggcccacagcatcttctgaacctgtgagctcccacttatttactgagagctcacctgggccagtgccggtccacggctgtggccgggactttgagtagatgctaccctacttgctatgcagagccagctggggcccagggaggtcagataactgcccaaaccaaatccaggcccagccagaatctcaactccagcctttgcgccttctgataaaacccagcatcgcttgaatttccagtacacgctgccaagtcttcgttaagcaataaataacccacacaaccctactgtcatgacaagttccatatggccatccagaaagagacacatagagctggttcctctcacctttatgaccagtgaaaagcgcaccaacacgaagacacgcgtgaaaggacctcatctcctaaccagactgacaagcaagggattttttccactcaccgtcagtgggatggttctaagcaccgaggccaacccatttcacacgattatttcacaaaaagaaactttctgtgggacgtgcctgggctactgaaaagacagccagcaaaactgagaaccttgttctcaaatccgtaccctctcccaaagcagcctcagaggcccgagggctgaggatccagacccgaaagccactgtaccttctgtaggatcaggctcaaggactaagggggtaaaaggtgccctttcccttcctaagcagaaaattctggaacccaaccttacgtgtgatcatttaaaaaaaaaaaaaaatcagctgggtacactggctcacacctgtaatcccagcactttgggaggccgaggtgggcggatcacctgaggtcaggagttcgagaccagtctggccaacatggagaaaccctgtctctactaaaaaatgcaaaattaaccaggcatggtggtgcatgcctgtaatcccagctactcgggaggctgaggcaggagagtcgcttgaacccgggaggcagagtttgcagtgagccgagatcatgccattgcactccagcctgggcaaaaagagcgaaattccgtctcaaaataaataaataaataaataaataaataaataaataaataaataaaatcactttctatggcttttcactgctccaggaacaatgtccacagataaaacgcccagcctctccttcacaccctggagcgcccatcctgcccactggtccgggctccaggctgccccctgcacctgtcagaagtccccctacaagggcagggtctcccttcctgggacatccactgcccttctccgagctgaagtcagaacgacctgagaatcagcttggagttctaccagcctcagccaagcccacctctgcgacagcactcctttcgagggggcaccagctgcagggagtctgtcccttacagacccgtgaccccgtgacagatgaataaagtacagacacacagatattctgctctgccagtccagctgagggtcccagccgcttataggctccctgctgagtcctgtaaacagttgctacttggccctgatcagctagtcagacgcgcatttattcagtatgattaattaacaaaagcttgagtcaacaccattagagtgtaacagacattgtggacttcccgagtaaaaagcatttaagcacccagggtcttaagattatatgagtaaacaagctagctaggtaaactactctgcctttcttttatttctatgtttatttgtttaactaaaggtaaagggatcaggccgccttcagccagagctaattaccaaagttatgccaacttctcggccttccaagatttgtgtctatttctataactatctctaatatctttcccaccagaatgattgaaccccaacacacctccgtctctcagcagggtctgcctgttcagagaacacaacttctccttcttgccttacacacaggggcaagaataggttcacccttgcagagagcacatccctttctgttactgaaaatcactttccaaaaaaaaaaaaaaaaaaagcaacacatacacacatactcaccacatacacaggtgggtcagagaaaaaaaacaagtacaaatggcttagggacatgagaagtgtggccctaactttcgctgaaagggatcctattaacattaaccctcacctctgggtcagagagggttggcactctacagcctgccttgaggctttacctactgggaccaaaaggactgctggaaagctattttaggccgggtgcggtggctcaagcctgtaatcccagcactttgggaggcagaggcgggtggatcacctgaggtcaggagttcaagacaagcctggccaacatggtgaagccctgtctctgctaaaaatacaaaaaattagctgggcatggtgggcacctgtagtcccagctactcgggaggctgaggcaggagagtcgcttgaacccgggaggtggaggttgtagtgagccgagatcacgccattgtactccagcctgggtaagagcaaaactccatctcaaacataaaataaaataaaaataaataaataaaaatactttttaaagccctattaccacaaaataaatccaggaacgtgtgacttggtacagcctctttggaaggcacattagctattacattagaatccacaccccgccgggtgcgatggctcatgcctgtaatcctagcaaattgggaggctgaggcacatgcccgtaatcctgcacaggcaggagaattgcttaaaaccaggaagcagaggttgcagtgagcaacgagcctgggcgacagagacagactctgtctcaaaacaaaaacaaaaacaaaaaacaaaaaaccacataaccttttcccatttgcacaaagctgggaaaccccaaatgccctccacaggggtctacggggggtcagggggtgggggcggtgagcacacttgttcctgccgacacagggaagtcttcttagcagctaaagagggcagcctctgcgtaccgcctgggaacatggcaaaaccattttaggcttaaaaaaaaggtggagaacaagttgtacattatgatcttttaaataaataggccagcgatatatttgtaacagaagcagctctggaagcgtacactgtcagccacagaaactctggggctggggggtggtaaaggaggagaaatgtgtcacccaggcaggagcttagtggcaccatcttggctcccgagttcaagcagttctcctgcctcagcctccgagtagctgggactacaggtgtgcgccgtcacgcccagctgatttttgcttttttttttgagacagagtttcgccttgttgcccaagctggagtgcagtggtgcgatctcagctcactgcaacctccacctcctgggttctagtgattctcctgcctcagcctcccgagtagctgggattacaggtatctgccaccacacctggctaattttttgtatttttagtagagatggggtttcaccatgttggccaggctggtctcgaactcctgacttcaggtgatccgcctgcctcggcctcccaaagtgctgggattacaggcatgagccacagtgcctggctggtttgaatttttaaatgatgatgaattcatgtatgactgatgtgatttttattagaaagagaaaactaggcagcgccccatcctatgtctccttcctggtggccaatgaagcatttcccacaactcactcctggcaccaacaggaagtcagacactcagcacccaggggctgctttttttttttttttttttttctttgagacaggcttgctctgtcacccaggctggagtgcagtggcaggatctcaactcactgcaacctccacgtcccggagcatgcctcagactcataagtagctgggattacaggcgtgagccactatgctcagctaatttttgtatttttagtagagatggggtttcaccatgttggtcaggctggtctcggactcctgacctcggtagatctgcccatcttggcctcccatagtgctgggattataggcgtgggccatcacacccagccaacagggatccattttttaaaggtaagagtgcaggctgcataagctattatccatgtcgttacataccaggcggacatgtacctaggcgggagggagactgaaccagtgaaattctaatgacaaaaaaaagaaatcagagtcatcccttacattcacatgtccaacgcccagctggaagccacaggctctccccactcctgtcctactacgatttttcccggctttgacctgcatggtggtgcggctgctccgctcagagcctcagagaaaccacacagagccctgctgagtcttgccctcggggcattctcacatttatgaagaaatgcctccccctcccccttctccccaaagtacggtgtggcagaaaacagcgccaacaggtcctgccagtcagaagccactcccctgatttcatggctcaagaccccaactgtaaattagcccttcccaccttgaatatgtacacacactactgagatccaggccgatccttgccatgggatgaacctgagaattgccaagacccgccttcccacgccacccaaccaaatcatgtggtatctggtacaagtgattttccccctgaaatcccacaagaaaactattttgaggccgggcacggcggctcacgcctgtaatcccagcactttgggaggccgagccgggcggatcacaaggtcaggagatcgagaccatcctggctaacacggtgaaaccccatctctactaaaaatataaaaaaaattagccgggcgtagtggcgggcgcctgtagccccagctactcggaaggctgaggcaggagaatggcgtgaacccgggaggcggggcttgcagtgagccgagatcgcgccactgcactccagccagggcgacagagcaagactccatctcaaaaaaaaaaaaaaaagaaaagaaaagaaaactattttgaaaagcagttctctctggcctggtgaagaacacaccagcaccatgcccaccaaaacaggagccccatggctgtttcccagagtaacctgggacccgcacgtccattcactgcaacacagactgaatctgcagccaagctccgctctctcactactgggcaaccctcaggggggatcccttagcctaaaccagcaccagtcactacccgcacacgattttattactactgttttcttatgagtcagcccgtgtcactgattcctgacgagctggtgtggagagcagaaatgaataattttcttttcaactgcaatttccttttcaacaaccagtcagcaatcggagctttaacaataaaccggttgctcagttactccacgtgggtgccacgcaagaggctgggagtattgctcagcggggccaacgggaggctggcacttgcctgaaccgcttaagtgggggaatgaaatgcccaccgaagggcagggcagggaccctgctgtcccgtcactgaagatattcccagcccgtggggagaagtgtaaacgaatgaatgaaagaaacgcacgtggtttctgggaccaatgaccttagcctagaactgccgggacggtccaggaacgcaaaaatgtagagatgtgggagccaggggcgtagtgatgcaaggatgcagggacccagggaccacgacctcccaacccccggcccgcgccccgtactcacgcacgcagtggcaggccatgagcttggctgcctcctcgggcaccgggcagctggggaagagcggcttgagcaggtaggtggcgaagaccagggccacgatgtactgcgatgaaggccggatgacgagcagctcgatccagagcttgaggaaggcgggcagcgagccgtagacgtccagcatgtaggcgtagtcgccgcccgatttggagatggtggtgcccagctccgcgtagcagagcgcgcccacgatggagaagacgccgcacgcggcccacatcaccagcgccagccccggcgagcctgcctccttaagcacgcccgtgggcgtcacgaagatgcccgagccgatgatggcgcccacgatgatggccacgccgttgagtagcgtgatgttccgctgcagggtcacgccctcgccctcgcctgccggcgccgcgccgtccgcgcgcttggaggccagcatcttctcccgcgcctcttccttctcctcggccaccggggccgctagcgcccgccgcttcgggcccgcacccgccatgctctgcttaccggccgggcctgggacacccgagagccgcagccgagcgaggattgtgcgcgccgctcgccgcccgcagctgcgtcaagaaccccgcccgcgccgccttttaggccccggcccgctggccccgcccaccgtccgcggctcctccccgccccgtggcccggccgcggctctcagccccgccccctcgacccagctcggagcacgtgcgtcctccggcctagcctggcaggcgattcccaggcccgcgtggtcctcgaaggcccccgtcctcctgcgccatggagaccccggcctcgcgacctacccccccggcgcccgcgtcatcccaccccgtcctcccgggtgcgcctgggcggggcctggcagtcagggcgagccccttcacccactggcccgcagcctctcgtcaagcctgggagcgggcagtgcaccagggctggcctgaggccaaggatggggtttggggtaccccccgaagggaacctaggctcctgtcccggatgggcctaggggatggaaccgcccccacaaccagctcctggggcacgggggagggatgagaggatgacctgaggggaagctcctgcagcctccttccagcctgggggctgcatcaatgtggctggtgagccgcgaactgagacgagggaagaaccgaaccgaggccacccagtaattcccattgtatcccaaaagaatcttgccaaagatggcgatccggtgcccgtagctttgagaagcagtaataacacaggctttgggaagccagcaatctgcctgagctcaatttaatcaacagaaccgggggttcaccgggagccataagacccccacccccaaatctagctggggaattcaaaggcaggcttcagtgtgaaggggctttaaagcttgttattcctggggaatgcgagaggcatcttagctaaaaagggttgagaggtaatttcagttagaggcgagagcaggatgccaaggctcctaggcctggaaacgggaaggaatataaatactgccccgagattgaccagactggtgagcagccaaagacctcttcaaagggtgtgtgtgggtcagggaggaagctcctcggtatcacccccacccggggttccttggcgtgtgtcctaacgagtccttggaagctcacagcaggcatgtggggaggcctttgttctgggtgagcgttcagcctcccagggcaaacacgcaaacaccggttgcagagctgggtgttcacagcaagacagtctgctgggcagatgcctctggaatccacagaatcctgaacaatagccgtggtggagggggggtcagaatccctgtcatgctgggacctctagctgcagccaggaatgtccaggccccaccccggggaggaggcggctgaggaatgccacggcttgtcattctggaccttgctcgccccccggtatggcgggcattcctctgcagtgataaaaccaagcgaaatctcagcagcccaggcagccaccggcaggggagtgcggaggtcacacagatactaacttgtaatctgccgtccacgctgctggctgtggaaggtgcagagagccctccatccgccctattcttcccgctgtgcctgcagagggaaggagacagtaccaccatggctgggcaaactcaccgagtgctcactgagtcctcccctagatagcttcttgtgcaatagggtaggtgccagttaggagcaaggttagagattgtagggccagattttttgcttaggttcaactacgcaaaataaaaatagactttgcatgcatttcaggcactgggctgacgaccggccaccagggaggctccgccccacttcttagctttggccccaacgttagtcttgttgctgctctcaggcgtgctctgcgtgtgaaagatgacttggaggctgggcgcggtggctcacgcctgtaatgccagccctttgggagaccaaggtgggaaaatctcttgagcccaggagttcaagaccagcctgggcaacatagggagaccccgtctctacaaaaaatacaaaaactagcccagcgtggtggtggtgcacctgtagtcccagctgctggggaggctgaggtagaaggatcacctgagctggggaaggttgaggctgcagtgagctgagatcacaccactgcactccagcctgggtgacaaagcaagactccatctcaaaaacaaaacaaaacaaaaaataacaaaaaaaaagagggtgaaaggcagccccagagtgggagaagagatttgtaaaatggacaaaggccttataattggaatatataaagaactcctaaaaatcactaagaaaaccacagacagcccaagagaaaaatgggcaaatggctcaagtaggtgtctggtgaaagaggatatgcagatggccaatgaatctgcacaaagtgctccacatcattaatcattagggaagtgcaaattaaatccacaggagacacctgggcacaccctccagaaagcacacaatgacctgctggcaaggacaggaacgaccactttggaaaactctttggcagcacagccaaactgagcctttccactcgaaaatgccctttgctcagaacccagcagcagctccaaagtctccacccagcctatcgggccccagtacccacccttgcctcccatgcctctctcctcacccctgcacttggctgcctcaccctcgggctgcaccttgaacaccagaagggcgctcctgcctccagcctctgcctggaattctctgccctcgggtagccatgtggttcactcctcctttggtctctgcccaaatggcccctgtagaagagacctccccacccagccatgtcctctccctgtgacttaccaccccagactttctgtgttgatgcatcgtggtctacctccttccgtcagaacgtgagctccgaggcaaaggctcttcagacctgaaacagtctaggctctgtccccagagtctagaatagagcctgccatgtaattggcactcaataaatgttacatgaattaatggaaaccatcctggcacgagtggtagctctctttccaccaaaagaatgagcttgccaagagagagagacaacatcacgaaagagagacagaaaagccacactcagacccaactttgagttctggatcaagtctttttttttttttttttttttgagacaaagtttcgctcttgtttcccaggctggaatgcaatggcgcgatctcggctcactacaacctctgcctcgcgggttcaagcaattctcctgcctcagcctcccgagtagccgggattacaggcatgcaccaccaagctcggctaattttgtatttttagtagagatggggtttctccatgttggtcaggctagtctggaacttggcctcccaaagtgctgggtttacaggcgtgagccacagcgcctggctcctatgttattttttaggagctttattgttttacctttcctatttagatctatagtctgtcaggaattaatttttgtgtgtgctgtgaggtaggggtgtgaggtatggtgagaaaaaagattcatggttccccatttggatatcccgttggctcggtggggtggctcatgcctgtaatcccagcactttgggaggtcaaagcaggagaactattggagctcaggggttcaggaccaacctgggcaacataatgagaccctgtggatcaacagatgaattgatcgatcaatcaatacgtagatagataagtatccaaatgatccaaaactattcacagaaaagcccaaccattccctacagcatgactcagggatcacaaatgtgtggaaccttctagacatgctattctttttcattggttgatttgtccttctctgacaggtaccacattatcttaattaatatagctttttatttttatttatttattttagatggagtctcactctgtcgcccaggctggagtgcagtggcgtgatctcagctcactgcaagttctgcctcccggattcaagcgattctcctgcctcagtctcctgagtagctgggattacaggcatgagccaccgcacctagctaatttttgtatttttagcagagacagggtttcgccatgttggccaggctggtgtcgaacttctgacctcaggtgatcttcccacctcggcctcccaaagtgctgggattacaggcatgagccactgcgcctggcctactatagcttttgaaataggtcttgacatcaaattgtgtgtgttttctggttttatcctgccagattacttttggttgtatttttggtagagacggggtttcaccatgttggccaggctggtctcaaacttctgacctcaagtgatccacctgcctcggcctcccaaagtgctgggattacaggcgtgaaccactgtgcctggcctcacaagaattcctttttattttgagacggagttttgctcttgttgcccaggctggagtgcaatagtgcaatcttgactcactgcaacctctgcctcccgggttcaagcaattctcctgcctcagcctcccaagtagctgggattacagacacgcacccagctaatgtttgtgttttttatagagacagggtttcaccgtgttggccaggatggtctcgatctcctgacctcgtgatccacccacctcggcctcccaaagtgctgggattaaaggcgtgaggcaatgcgcccggccaggagtttttacaaggaggaagctgaagctggaaaggcacggaaaaggatcctcccctagagcctcagaaggaagcagccgtgcggacaccttggtgtcaggcttctggctcactgaaccgtaagagaatcagtctccattgttttaagccaccaagtttgtggtactttgttacagtgaaactaagcaccctgcacttgcgttgggtgccatggcacacccctccatcccagcgttatgttccccacggtacttacacatctttctttcacttgcagctgaaacgtactttgactaaaacaataacctcattctctctttttaatttcagaagtcacgtacaatcacattgtgaaacttgggaaacaacgcttccttccttcaaagtcagttctgctattcatgtggacctaatgtctctaggatcttgtgccctcattagtggcctggaaggacgcccagaccttccagttcatcaggggttgaagtggacgatagttgttcaccgtcatcttcttctcttcaccaagtgcagaaaacaggagagtacgaaatgcagagagctggaatagagggcagccagggtgagcttggtatgagtgcagggtgagccagcccccaggtgtccctcaggccttgtgtggtctcctcccatgctgaatcaggatggcccgaaatgaccagtaaagatggtggaagtgatggtgtgtgcagggccagcttataaaaggcattgccgcttccgccttggtctttaggatcacttgctctggggggaagctggtcaccatattgggagggtactcaagcagccccgaggagaggcccacagggagaggagctgaggctcccagccaactgccagcgccaacttgccatccacttgagagggccaaccttggaatgaatcctctagccctagttgagctttcagatcgctacagtcccagctgacactgggctacaattcatgaaagatggtaagccagagccacccaaattcacaacccaaggaaactatgggagataataaatgattggtttttgttgtcattgttgttgttgtttgagacagtgtttccctcttgtttcccaggctggagtgtcattggcaagatctcagctcgctgcaacctccgcctcccaggttcaagcaattctcctgcctcggcctcccgagtagttgggatcacaggcatgagccaccatgcccggctaatttttttttttttttttgagatggaattttgctcctgttgcccagactggagtgcaatggtgtgatctttgctcaccgcaacctccgcctcctgggttcaagggattctcctgcctcagcctcctgagtagctgggcttacaggcatgcgccaccacgcccagctaattttgtatttttagtagagatggggtttctccatgttggtcaggctgctctcaaactcctgacctcaggttatccacctgcctcggcctcccaaagtactgggtttataggcgttagccactgtgctcagcctaattttgtatttttagtagagacagggtttcaccatgttggtcaggctggtcttgaactcctgacctcaggcgatccactcgcctcggcccccaaagtgctgggattacaggcatgagctactgcacccggcccaaatgattgttttctaaagccactatgttttgcagctatttgttacacagcaatagataactaacacctataatgtaaatgctaaagtaacatttgaatttacttttcactcaaggaactaaaagactactttttatggctggatgcggtgcctcatgcctgtaatcccagcactttgggaggccaaggtgggtgaatcacctgaggtcaggagtttgagaccagcctggccaacatggagaaaccctgtctctactaaaaatacaaaattagccaggtgtggttgtgcatgcctgtaatcccagcactttgggaggccaggtgtggtggctcatgcctgtaatcccagcactttgggaggccaaggtgggtgaatcacctgaagtcaggagtttgagaccagcctggccaacatggagaaaccccatccctactaaaaatacaaaattagccagatgtggtggctcatgcttgtaatccagctcctcgggaggatgaggcaggagaagcgctttaacctgggaggtggagcttgtggtgagcgagatcacgccattgcactccagcctgggcaacaagagggaaactctgtctcaaaaaaaataaataaataaaaaataaaaaaagactttttatgtattatctcacttgttcacagaatatacttacgaactctgtgaggcaactcacacatttaattaaattcagaagtgagattatgtctacatgctgacagcatactgggccagttagccctgcgtgatgatccagcgccccctagaattgtgcgcgcatggtgcacctggcctcctgggccatgaccacagtgtgctcatccacatttgtggtctgcacatttgttgactgtctcagaaaggcagcctttctcctcccctggaaaactccccgccttccaggacatgtgcctccctggctcccctgctcaggataaggggctcctgccctgcatttttatatgacaccggccaccctggcttaatactattggcttcgtttctactttcctgccagacagcagtattctgagacgaatgccctgttcctgtgccgcccctccacacctgcccccctcccaccctctcttggtggcacagacccagaatgggcacttgtcacatatatgcttgttgagtagcataagggccttgctgacaaggggccaccttcaacaaaagccttccccatgtccaacagctctggtttggaggtaggcagatattctgcatcccacatctccacgtgcaaatgacatcatgccatggtttgtatataagggaatattttcacaggcccaggagactgaaagaccctctaagagctcacctggagccctcagaaagagatgagccagagatgctaagtcctgctgcgactgctgagaaatgtctgccgggcgggggcggggcataggcagcatgcctgtggctctgaactgccttggacagacagaattgctatagattcttaagatttccagaaaaaaatgatagtataacttttatttattttttattttatttttttgagacagtctcactctgtcgcccaggttggagtgcagtggtgccatctcagctcactgcaacctccgccttccaggttcaagtgattctcctacctcagcctcccaagtagctggcactacaggcacacgccaccatgcccggctaatttttgtatttttatttatttatttatttgagatggagttttgctcttgttgtccaggctggagtgcagtggtgcgatctcggctcactgcagcctccacctcccggcttcaagttattctcttgccccagcttcccaagtagctgatattacaggcgtgcaccaccacgcctggctaattttgtagatttagtagagacggggtttcaccatgttggtcaggctggtctcgaactcctggcctcaagtgatctgcctgtctcagccttctaaagtgctaaaattataggcatgagccatgacgcccagcccaatagtataacttttaaaaatgtatacaaggattattaactaattttcgaaaaaaaaaagcaatgaaactatttagataagaaaaaggaggccgggctcggtggctcatgcctggaatcccagcactttgggaggccaaggtgggcagatcacctgagttcaagaccagcttggccaacatggtgaaatcccgtctctactaaaaatacaaaaattagccaggcgtggtgatgggtgcctgtaatcccagctactcgagaggctgaggcaggagaattgcttgaacccaggaggtggaggtagtagtgagctgagatcgagccactgcactgcagcctgggcgacagagcgagactctgtctcaaaaaaaaaaaaaagaaagaaaagaaaaaggaagaaaacaaaaaccatgcagacccatgacgctgggacaactcccatggatgccttgtgtgtctgtgtgtgatagattagggcattgctcagaacatgctcgctgtgatcactggaaccgctgtccaatctcaacaagctcctacttcaattggaactttcttcttgtgtaagaacaccccaaatgcatgaaagaatatatataactcctcaaggctcttatgcagcatcttagtgacgctgccaagcaagagagacgccttccatgaagcgccatcatgccagttacgggcacggctcacttggcttggggccacttcaacgggctccttctggatgatccaggtgaccgactcggtcagcggcggggtggtgagcgagcccacataggtccagtaatcccagcaggtgggcagcagagcggaggggtcgaaggggcgcatggccgcccgcgcgtcctgagagaccgagaagccaaggccgtgtcagtcctcaggcgggactaggagcttccatcttgtctcagcacgggaggccttcatggtgcttggaaggaagtgctttccccgagataaggccatgaggccactgctgtcacacttggaagcagtgataagaaaatgtgacccttctatacagagcaaggattcctgccaacttacattggtgggaattacattacattacaccagcttatgttggtgcttacatttttccttttgaagtcatttcttggggcgcagtagctcacccctgtaatctcagcactttgggaggccgaggcgggtggatcacttgaggtcaggagttcgagaccagcctggtcaacatgatgaaaccctgtctctactaaaaatacaaaaattatccagatgtggtggtgggcgcctgtagtcccagctactcaggaggctgaggcaagagaatttcttgagcccaggaggcagaggttgcagtgagctgagatcacgccactgcactccagcctgggcaacagagtgagactctgtctcaaataataataataataataataattaataaataataaaaacgccatttcttttagcataccttggctgcaaaaaatattactttttattgtgataaaatatacataacataaaatttaccatcttaacctttttttttttttttgagatgcagttttgctcttgttgcccaggctggggtgcaatggtgcgatcttggctcactgcaacccttcgcctcccaggctcaagtgattctcctgcctcaacctcctgagtagctgggattacaggcacccgccaccacacctgctgattttgtatttttagtagagacggggtttcttcatgttggtcaggctggttttgaactcccaatctcaggtgattcacctgcctcagcctcccacagtgctgggatgagaggcatgagccaccatgcccagcccatcttaacaatttttaagtgtaaagtttcatggcgttaaatgcagtcacattgtggtgcaaccatctccaccatccgtctccagaacttttccatcatcccaaactcaaattctgtcctgaccccactaaacactatgtccagcttcctcccccaggcctggcacccaccattctgcttccatctctctgaatctgaggactctggggacctgatgtgggtgggatcctgtggtttttgtcttttgtgtctggcttatttcactgggcataatgtccttcaggtttatccacattggagcatgtgtcaggagtccctgcattgttgctttttttttttttttttttttctgagacggagtctcgctgtgtcacccaggctggagtgcagtggtgtgatctcggctcactgcaagctccgcctcctggagttcaagaccagcttgaactcctgggttcatgccattctcctgcctcagcctccccagtagctgggactataggcacccgccaccacgctcggccaattttttgtatttttagtagagacggggtttcaccatgttagacaggatggtctcaatctcctgacctcgtgatccgcccacctcggcctcccaaaatgttaggattacaggcatgagccaccgtgcctggcttgcctggagacatttctactgctaccttaccgatcagggtatccagtatctccgtgattaccttcatctgtccctggaaactgtgcctgccaccctacgctgcagccgtccagggactggcaggcctcggcctaaaggtctggagggtgggcgacctgcaagactcacaagaggggaagccaacagacatacctatagacggagtgctgtgcccctggtgccgacaagaaagccaaggctcgggctgggtcagcaaccgaattccagtttagaggcagatttggtcgtggacatggccagccacctcagtaaaattagagaggattattttgcattgaatacactcacagccaaaaaacaaaaaaaaagagtcagggtcttactttgtcaactaggcaggagtgcaatgatgccatcatagctcactgcagtctctaattcctgggctcaagcgatccccccgcgtcagtctcccaagtagctaggacaccataccagggtttaaaattaattgtttgtagccaaggggtcttgccatcttgcccaagctgttctccaactcctgggctccagtgatcctcctgccttggcctctcaaaatattgggattacaggcataagccactgtgcccagccagctcttttggatatatacccagaagtgtgtgattgctgaatcatagggtagttctatttataactttttattttttttatttttttgaggcagagtctcactctgtcttccaggctggagtgccgtggcatgatctcggctcatggtggttgggcctggccgcaacacagccttcatcagcatcccatgccaaccaagcacaactctgcacctgtccctggccagcactgtgggacaagagtccagtccaaagtgacagagtccctgtctgcaaggaagatggcctccctgctcagccacatcacatcaccttgactttgctgggccctggccttccaaggtggaagccggcaacctagatgccttgggcttgtctcctaacatcaagcagtgagggtcagggtcaagagaggtggctgagctaccagaaggaagcccaggagtgtccacgccggcagacacatgcatcagttctgtgcacacgtgttcacgtttataattatccagttaattaaaaaaaaaaaacagcattataggctgggcgaagtggctcatgcctgtaatcgcagcactttgggaggccaaggcaggcagatcacctgaagtcaggagttcaagaccagcctgaccaacatggcgaacccccgtctctactaaaaatacaaaaattagccaggcatggtggcaggtgcttgtcatcccagctactcgggagactgagacacaagaattgctttagcacaggaggcagaggttgcagtgagccaagattgcaccattgcactccagtctgggcaacagaaagagactcggtctcaaacaacaacaacagcaacaaaacccacagcattattgtgatagaattcacataccatgcaactctcccatctaaagtgtacaacctggttgggcgcgatggatcatgcctgtaatcccagcactttgggaggccgatgtgggaggactgcttgaggccaggagtttgagaccagcctaagcaacataacaagaatctgactctacaaaaaatacaaaaactagccaggtgcagtggtacatgcctgtggtcccaggtagttgggaggctgaggtgggaggatggcttgagccccggaggttgaggctgcagtgagctgtgatcataccactgcactctagcctgggtgacagagtgagatcctttcttaaaataagtaaataggccgggcacagtggctcatgcctgtaatcccagcactttgggaggccaaggcgggtggatcacctgaggtcgggagttcgagaccagcctgaccaacatggcgaaaccgcgtctctactaaaaatacaaaattagccaggcgtggtggtgcatgcctgtaatcccagctactcgggaggctgaggcaggagaatcgcttgaacctgggaggcagaggttgcagtgagctgagatcatgccattgcactccagcctgggcaacaagagtgaaactccatctcaaaaaaaaaaaaaaaaacagaaaaagtaaataaaaaattgaagtgtacaattctatggttttgggtatattcacagttgtgcagccatcccaagtcaattttagaacattttcagcacctcaaggaggaagcttggtactttttagctcttctccccacccccgccgtgctgcttctgtctctgtgggtttcataggaactgagtcatgtaacatgtggaacatttgtgtcttgcgtctgtcacttagtatggtgcttttgaggctcacccacaccgcagcgtgagttagagctgtgtcctttctgattgccaagtaatatctcattgcatggtctagctgggttgacatcccattgcacactctagctgggctgtgaaggagcaggctgcttgtgcacatgggtaacggatgtacagtgagacgtcagtctgtgcacatgggtaacaggtgggtgcaccgtgaggtgttagtctatgcacatgggtaacaggcgggtgtgcagtgagatgtcagtctggtgcacatgggtaacaggcaggtgtgcagtgaggcgtcagtctggtgcacatgggtaacaagtgggtgtgcagtgaggcgtcagtctgtacacgtgggtaacaggtgggtgtgcagtgaggcgtcagtctggtgcacgtgggtaacaggcgggtgtgcagtgagatgtcggtctatgcacatgggtaacaggtcggtgtgcagtgagacgtcggtctgtgcacatgggtaacaggcgggtgtgcagtgagacgtccgtctatgcacatgggtaacaggcaggtgtgcagtgagatgtcctctcctcctgccggccacacgtccccgctcccagggcacagatgtgccagtcactttctgagcaactacttcaaatcttcagaacaacccttcaagaagtatttctagtttactgatgaagatagacagacagatataaacaacttgcccaaagccatgttgccagtcagggccactgaggcctggccctttccaaggtgcgggctcttctctccctccccaggactgcaggaatcagtcgggggagtggcaggccccagccattccactgcgtgcaggtttcctgccaattaagctttccagccttgggctgagaagaggatgcctgtgtgttgcctcatcgtccccaggagttcctgtcctgtctctaagatgcatgagagctggagcagccatgtggttacagaaagctgctccccctcagggcccccaaaggaagtcagggcccttcctttatgcgtgtggtgagccccaggcagctagaatgggacaccggtgagcacaccaatgaggctgaagaccatcacatccattatctgagcacggatggcccagctacctgtggaaagcaccacaagcctttgctggcggaagtgggttggtgacttgttccacttttctcttatttatttatttattttgagacggagtttcgctcttgttgcccaggctggagtgcaatggcacgatctcggctcaccacaacctccacctcccgggttcaagcgattctcctgccttagcctccctagcagctgggattacacgcatgcaccatcacgcctggctaattttgtatttttaatagagatggggtttctctatgttggtcaggctcatctcaaactcctgacctcaggtgatccacccgcctcagcctcccacagtgctgggattataggcgtgagccaccgctctgttcctggttttgtcttctttctcttaaacaggaccccgcattttatgagcgtcaagcctcacccagcctaactccgcccttggtttgtcctcttagagtctcagtttccccaggtgtacgacaggcagtgtggtggctgtaatgggcttccatcagtgcctgccacatgggcgtggggctcggtaggtgctgccgctgctgctgccaaagctagaagagcccccacagggcatagagccattccctggatcccctggacctggtgggctgtttccaactccacaaggcagccaattccccggtagccctgactcttgcgaaggcagggaggaggggggaccccagcagcctgaggagcttgcagcttgtccaggcatggagggtggggaccctctgtgggcagtttttgccaaaacttctggctatggtgagagggtcaaaggcgaagcctcgaggtctccattctgggagtgtctgcccagggtcaccggggccacactggggctgggcctgcgtgctgggagctgagtgcatagtgacaggtcggcactggtaggggcctgtgcagatgggacggcgctgggggtgggggtgggggtccgggcttccaggcggcgcctaatgtggttttggttatagacactgcctgtgtttccctctaagctgctgaaaagctcagaaatgtgcagcagggcctggagctcagcctgggttctgactgcatgtgggaggtgggcgctgggacgactgggagttcaggctgcatggacccacttcctgggtttaaaaacgggctcttcacctgccacctgtgtgcccgggcaaggccttctctgcctctctgagctttggtttccctgtgtgtgcaagacagatgaatcacaggccctgccccgtggagtgattggaagattcagtgtgataatttatatggagggctgtcgcttctttgaacccttcccaccgaggtgtggggcgatgtccccttgccctgagcctgggcaggtgctcctggcgggagtggtgaacaggatgccgcaggagcagtgctttgtgactctggaagccagggcagaaaagacatcgtgtccgtctggctctttctggaaatgcacccttggagccctgagcactgcatagaagccagctgggtccccagggaatgaccgtggcaggcattcctggagggtctctgccgagtcagtcccacagcagggcccggaccagcctggaactaggagagatgatggggactacgtgactctggtctttcctgccctagttcaggacagcttgttccttaactggaggaaaccaggaaaacagcccagaagctgcaggtgagcccatccctgggtgaggactgctgagtccgcgggggtgagaggcagagctgggatttgaagccaaggccatctgcccttgagcctgaggccaccacggccccgtcctgccctgcactgcccaccaatcaggagttagattcaaccacacttctagcattttccatcagaaggccatcattctaaagtttcatggactcccaaaaggtaatagctctctctgggaatcagctgactgaaagcacccgcagcaacaaaaagcgactttaaccttagtgattgggctggtggattttcgtttcgtgacaggcagcagcagcctgtgcattccacagcagacgtgtgtgtgtgagtgttggccacagctgggccttaaactcaactgcacatttcaccaagaaccagacatgctccttattccattacatggtgagaatgctgctctagtgtggatttttttttttttttggagacggattctcgagctgtcacccagactggagtgcagtggcatgatctcggctcactgcaacctccatctcctgggttcaagcgattctcctgcctcagcctcctgagtagctgggattacaggagtgtgccaccacacccagctaatttttgtatttttagtagagatggggttttgccatgttggccaggctggtcttgaactcctgacctcaggtgatctacccacctcggcctccctaagtgctgggattacaggtgtgagccaccgcgcccgggctactgtggatgtttaacatctccatttcacaggtgaggaagctgaggctcagaggtgcgcagctcaggagtggtggatcagggctctggacccaggagtccaactgtggggctctctgatacactgtgctatgggagaagctcccagaagtcctaggctaggagcctctaggcgagagggttgttcaagtctcttcccattccctgacccatgaagcatagactcttgccccgaaggctgggtcttttacctcctaaggtctttttttttttttttttttttgaaatgagtctcgctgtgtcactcagcctggagtgcagtggcacaatctcagctcactgcaacctccatctcccagattcaagcaattctcctgcctcagcctcccgagtagctgggattacaggcacccgccaccatgcctggctaatttttgtagttttagtagagataggctttcaccatgttggccaggctggtcttgaactcctgacctaaggtggtctgcctgctttggcctcccaaagtgttaggattacaggcttgagccaccgcactcagcctcttaaggtcttttaatttctcaaaggtctaactcggccaggcgcggtggttcacgcctgtaatcccagcaatttgggaggccaaggtaggcggatcacttgaggtcaggagtttgagatcagcctggccaacatggtgaaaccctgtctctactaaaaatacaaaaattagccaggcatggtggtgggcgccggtacttccagctactcaggaggttgaggcaggagaatcagttgaacctggaaggcggaggttgcagtgagccgaggtcgcgccattgcactccagcctgggcaacatagcaagattctatctcaaaaaaaaaaaaaaaaaaaaaaagagtctagctctttattttcagctgaggggatgagcccagagatcagcatcaggaccagagctcagtccgcggtgcacttcctcccctgtcccgggcatcattcctcccctgtggtttgcctagaaaattttgacttaccccatggggaagaaatgctccagaaccttccccaggaggaaaacagcccttgggtaaagggtccttcacagccagctcttttctttcccaccaagaggtgggaccacctggtgtgggaggtggaggctggctgggaaaacaacccctccccaggtttcctctggctgtggagccgcgcggaggaagaggatggggcgtcagagctctcagaaccgtggccttgtgaagtttctgagcaggcaaatggggcggcggggggtgatctggtcccagccccaggaggccgccccgaagccagcatcaaggcgaaggccacgtacagatcaaacggctccttgaaccgcgaggaagggctcgccccagctccatctggaccagcccgcaccattgttaacacaggttgaagcctcatccgtccgcacatctgaggcttgcgttgactccttctgccctggaattcttttgtttgctgctgaataaataaactacatttctttggaatttctccttctccctcaaagccttttctcagctgatcttggagaaaggcgacactcttgtccccgccatcttttcgagctgtgctggatgcagggaagcgtatggagagctgggcgctggatgcagggaagcgtgtggagagctgggccggagagccgcggtttgggcaggtttctctctgcccttgggcttggggtcggacagggacgttcaaggagatgctgggtggtacatgagtcaacattcttaaatgttattagttagggatttgaggtttttgtttcaatctgttttcaaacaaactttatcattagtgaatatcatcacccaggacaaggctaaaaatttttcgagctaatcaatttaaagaaaaatattaagtaggctgggcgcggtgattcacgcctgtaatcccagcaccttgggaggccaaggcgggcggatcacctgaagtccgcagtttgagaccagcctggccaacatggtgaaaccccgtctctactaaaaatacaaaattagctgggtgtggtggcgcacacctatcgtcccaactgcatgggaggctgaggcaagagaattgcttgaacccgggaggcggaggttgcagtgagccgagatcacgccactgcattccagcctgagtgacagagggagactcctcgaaaaaataaaaaagaaaagaaaaatattcagtagaaagttgtcccattggcaggcagatatgtcaaagtcttcaggatcttgcctgcacgactgaattttgggaacttccattgagcccaacacccttattttatggaggaggaaacagggtcccagagcagtggtgacgcattcgaagtcaggaagagctagctgtggacacacgagcatcaaccctgcggaatcctgtttccagaactggaatcacagcgcctcggcggggctctttccactatgagatttctttttccttgcaaatgaatcgctgcactaaacaattttgcttgtcaaattatgctgatttcttttctttttttttttttttttttgagataggatttcactcttgtcacccaggctggagtgcaacagcgcgatctcagctcactgcaacctccacctctgggttcaaacgattctcctgcctcagcctcccgagtagctgggattgcaggcatgtgccatgacaccctgctaattttgtatttttagtggaggcgggatttctccatgttggtcaggctggtctcgaactcccgacctcaggtgatccactgcctcagcctcccaaagtactgggatcacaggcgtgagcctccgcgcccggcctgctgatttcaaatatgcagcttaccttatgttttacttccagcaagacgtccaccagcctctgcagcatctgatgatgggccccgagctgcgtggcagacacacaaggggttagctgaaaaggcagtgggtggcggggggaagctcactccactataaatacaccacgttttaaaagcaatcctaggccaggcacggtggctcacgcctgtgatcccagcactttgggaggccgaggtgggcagatatctaaggtcaggagtttgaaaccagcctggccaatatggtgaaaccctgtctctactaaaaatacaaaaattagctgggtgtggtgacacactcctatagtcccagctactgggaaggctgaggcaggagaatcacttgaacccaggaggtggaggttgcaatgagccgagaccgtgccactgcactccagcctgtgtgacacagcgagtcctgtctcaaaaaaaaaaaaaagcaatcctaatgatggatcaccactttcttcattagatctacaccccagcaagcgattacctttaaaaacacgcctatcacagaaaccattctctcccacgacagcttccttgtaattttggtatttcacagaattccagtgaactaaatgcagctgaaacacaatggaaagagaacttaaattgatcagcaagaaataagacagtcacttccccttctgaatggctgacctatgtgtccacttaatcataatgaaatggccaggcgcagtggctcacacctgtaatcccagcaccttgggaggctgaggcgggtggatcatgaggtcaggagatcaagaccatcctggctaacatggtgaaaccccgtctctactaaaaatgcaaaaaaaaaaaattagccgagcatggtggcgggcgcctgtagtcccagctactcaggaggctgaggcaggagaattgcctgaacccaggaggtaaagcttgcagtgagctgagattgtgcctctgcactccagcctgggtgacagagcgcgactccgtctcaaaaaaaaaaaaaaaaaaaaaaaaagaactaagttgttgcagccagatgtgtaagatcccagcactagcagcacctctgagctcccaggcacttgatgaagccatgggaaggaagagcctcagtcttcctggtggtgggaaaaaggagaggatcatgttaacctcatccaatagaaatgggtggtttcattattttctacttcctagttatccttggacaaggattaccagaaaaaactcacgcctcggctgggcgtggtggctcacgcctgtaatcccagcactctgggaggccgaggcgagtggatcacgaggacaggagttcaagaccagcctggccaagacggtgaaaccccgtctctactaaaactacaaaaattagctgggcgcggtggcaggtgcctgtaatcccagctactcaggaggctgaggcaggagaatcacttgaacctgggcagcagaggttgcagtgagccaagattgcgagatcgtgcgatcgcgccactgcactccagcctggggaacagagtgatactcagtctcaaaaataaataaataaataaaatatctgttcatcaaaaataaagttgcagatagagatactaaaataaaaggcatgttgttaaatgaaaggaagcacacagaagccattgttgcgctcattcttggaactatttataaatatctgtatgatgatgacaatagatatcactccctatttataaaatgtccggaggtcacctctgggtgtgcgattacaagcaattttcattttttggtttgggtgcactctagttccacattaactgcagcattactttcataacaacaacaagttcaaaaaacagaaagagtcctcaacttgaaaaagcatcaagaagtcaggtgagtgggtgagcagaggtgtgataaagtgaatatggcaaaaatgatcatcacaggactgagacgtcaaactcatagattcttcttgttcatttcttttcattttttcgtatgttgcaaaaatttcataataaaatatttggggaaatctataaggcatcacttatcacccaaaaaaactacaaaaaccaattcccagcattgatctgcactcattttctctactgactcccactttggaatgttgaaaataagactgctttaagaagatgatcttggccgggtgcagtggctcacgcctgttatcctagcattttgggaagctgaggtgggtggatcacttgaggtcaggagtttgagaccagcctggccaacatggcgaaaccacatctctactaaaaatacaaaaattagcagggcctggtggcacgcacctgtaatcccagctactcggaaggctgaggcaggagaatcgcttgagcctgggagatggaggttgtggtgagccaagattgcaccaatgcactccagtctgggtgacagagtgaaccctgtttcaaaaaaacaaaaaacaaacaaacaaaagaagatgatctctattgcaaagatgttcagcttctcagcggagggccttgtggatttgctagtccctacagctgcaagcacacagctgagtgaagcgtggcaaagagctcaagctctgactttgaatcccagctgtctggctttggcaagttccgtaaccattcagaacctcagtctcttcttccgttaaatgagagaacttacagtgtcttcttcgtaggaggggggtgtgaccaaacgggtggggcggccgacggttctggtttgagcactgacagtcccaggccccaggaaatccttcacatctgagcggcaggcatggcttgttcaccccccaccatagagccggagacatggaaagcgtccagatatgtgctgttaggccacgtctacaaacctctgcggggtacacgtggccgtccactgtgtgctctgagcccccctcgttcactgctccccagtggaagtgaaattgcttcagtctgtagtggttttccaagggcccgccactaattcctggaaataaaggcagcgagacgtgtgtgtcattttgtctgtttgttgagctgtggtgttacctgaggcattgtctacattagggttatatgagttcactcgcaaggggttgctgtatggttgaagtgacaagccaaaggtgggctccgtgaaaggtgggctctgtctgtcccattcactctgccccccgccagcccagcgcctgcccagaggttcacagtaaatgtggaatgaaggcagggtcccagtgctgccactgggtggtggtgagggcctcatctccctgcaggcagaaatcggtaaagaaagtttctgagatgcctgcctgtcctataagatttccagactttaatttaaaaaaaaaagatgtcttccaaatattttttaaaagcagcttaaatcctatcaccaaataacattataaaataacacaatgagcaaagtttttgttttgttttgttttgttttgttttgttttaagacagaatcttactctattgcccaggctggagtacaatggcatgatctcagctcactgcaacctccacctctgggttctagtgattctcctgccccagcctcctgagtagctgggattacaggcatgtgccaccaggccaagccaatttttgtattttaagtagagacggggtttcaccatgttggccaggctggtctcaaactcctgatctcaggtgatccactcgcctctgcctcccaaagtgctgggatgacaggtgtgagccaccgctcctgggtgagcaaggtttttaaataagcagaccctgagctatagcatcagtcctgatctctggcagtccctgcttaatctaggcccaccacagggccagcttttattggaacactccttccgtcctaagtcaccctaaacactcaccttggagtcagcgctctccacctgcaggccttggggtgcccctctccatggcacagtgccaggtgcagcctcccaggagcttccttctcctgacacgtggggctcagccataagcatcgctcactgaggcctctggctctgcctcacagagtcatggctgccatccccaggtccaggtagtgctgggagtctgccttttaacgagctccccaggggttctgatgtgggtggcttctcctgtgtctaagcactttgtcactaacagatttccatcaacagctgctacaaatgtggtacctattccacacgttttcattgaaaggagcacagtgtgctcctgggatggctgggcaaggctggaaggcgccagcagaactggagcactgatcacgaattcgcggtggcccgagtgcctcccgtagctgtggaggagcctcgtgtcacccgccttgctcatgtcacctcccactgtggcaaaagccaggaaaacactgagcgcatgacaaatgccttggggagcttgacagtgctgactcctggtggtttcctgacaccaaaagtacttgggctgggcgtggtggctcacacctgtagtcctagcactttgggaggccgagatgggcggatcacttgaggtcaggagttagagaccagcctggccaaggtggtgaaacccatctctactaaaaatacaaaaattagctgggtgtggtggcgggcgcctgtaatcccagctactcaggaggctgaggcaggagaattgcttgaacctgggaggtggaggttgcagtgagctgagaacgtgccactgcactccagcctgggcgacagagtgagactcagtctcaaaaaaaaaaaaaaaaaaaaaagtactcatagttggaggcaccaaggtgtaaactggaaaatggaaaatggatttggctttggtccagtcaggggctaggcaagtgctggaccaagccacagagctgctcactgcccctcttcactcaaaatctcagtgttggtctggagcaacctcggagtcatatctagttttaaaattctaccattatgagcaagtcttctagtctccttaaatatacacagatgaattacatctcaatttttaaaaatacacagaaagagtgcttcacacaataagcacattaaatcactttgttaggccaggcacagtggctcacgcctgtaatcctaacactttgggaggccaaggcaggtgtatcacttgaggtcaggtgttcgaaaccagcctggccaacatgctaaaacctcgtctttactaaaaatacaaaaaattagccaggtgtgttggtgggcgcctataatcccagctactcgggaggctgaggcaggagaattgcttgaacccgggaggcagaacttgcagagagccgagatcataccaccgcactccagcctgggcgacagagcaagactccgtcttgagagaaaaaaagaaagaggccaggcgccgtggctcacgcttgtaatcccagaactttgggaggctgaggcgggtggatcacaaggtcaggacatcaagaccagcctggccaacatggtaaaaccccatctctactaaaaatacaaaaaattagccagatgtggtggcacgtgcctgtaatcctagctactcaggaggctgaggcaggagaattgcttgaacctaggaggtggaggttgcagtgagccaagattgcatcactactctccagcctgggcaacagagtgagaccccgtctcaaaaataaataaataaggccgggcgcagtggctgacacctgtaatcccagcactttgggaggccgaggtgggcggatcacctgaggtcaggagttcgagatcagcctggccaacatgatgaaaccccgtctctactaaaaataaaaaattagctgggtgtggtggcatgcacttgtagtcccagctacttgggaggctgaggcaggagaattgcttgaacataggaagcgaaggttgcactgagccaagatcgtgccactgcactccaccctgggcaacagagtgagactctgtctcaaaaaataataataataaataataaataaataaaataaaataaagtctactcttactcttaaaaaaaaaaaaagaaaaaaggccaggcatggaggctcacgcctgtaatcccagcactttgggaggccagggcgggcatatcacgaggtcaggagatcgagaccatcctggccaacatggtgaaaccctgtctcaccgggtgcggtggctcacgcctgtaatcccagcactttgggaggccgaggcgggtggatcatgaggtcaggagttcgagaccagcctggccaagatggtgaaaccccgtctctactaaaaatacaaaaattagccgggcgtggtggcacacacctgtagtcccagctacttgggaggctgaggcaggagaatcgcttgaacctgggaggcagaggttgcggtgagccgagattgtgccattgcactccagtctgggtgacaagagtgaaactccatctggaaaaaaaaaaaaaaaagaaaccctgtctctactaaaaatacaaaaattagctgggcatggtggcatgtgcctgtaatcccagctactcaggaggctgaggcaggagaatcgcttgaaccaggggagttggaggctgtggtgagccgagatcgcgccactgcactccagcctggcgaaagagcgagactccatctcaaaaaaaaaaaaaaaaaaaaaaagaggccaagcgcagtggctcaggcctgtaatcccagcactttgggaggccaaggcgggtggatcacgaggtcaggagattgagaccatcctggccaacatggtgaaaccccgtctctactaaaaatgccaaaattagctgggcatggtggtacgtgcctgtaatcccagctactcgggaggctgaggcaggaaaatcgcttgaaccagggagtcagaggttgcagtgggccaagattgcttcattgcactccatcctggcaacagagcgagactctgtctcaaaaaaaaaggaaatcttcctgcctcagctcctgagtagctgggattacagatgtaagctaccacatctggctccaatttaagtatccacatgtggctagttgttatctattggaacacgcagttctggaggctttaatatagggactccttatggagaaatggatatggttaaaggaggctacaaggaatgctgaagccctaagagactagcaactattggagcctgttactgcttctaggactgatggggtaacaggcagaaactgtgttaccgaaactcattaaaacctggggatgtagaaggggccacctgacaggtgctgcagatgtgggtggggagatgaagccactgccagagatgtgaggcacagcaggaagggagcagaatagaaatgtcctgactgtcctcccccttggagctccagccagtcctccctttagctaaactcaagtgaaatccaggccgggtgcggtggctcacccctgtaatcccagcactttgggaggtccaggcgggagttcgagaccagcctggccaacatggcaaaaccctgtctctatttaaaaatacaaaaaaattagttgggcgtggtggagggcacctgtaatcccagctatttgagaggctgagacagaagaattgcttgaaccggggaggcggaggttgcagcgagccaagatcctgccactgcactccagcctgggcaacagatcgtgactccatctcaaaacaaaacaaaacaaaacaaaaaacagagggtgggggagcctccagggcagagggtagggctgagaataggtctgggagtgagggtagatgatgaccagcccagagccacaaaccccaaaacatcacctctgaaccccagggctctgaggaaccctgtctgaaaccacttcctaggtgggacacatccaactgaacggaaacagaactgaacagatacgagggtggggggacccctggaggtcccttctgagggatctttgcttagttctgttctgttcctttcttttttcttttcttctttccttttcctttccttttctttctttctctttctctctctcttcctttcctctttccttttttttttttttttttaaccgagtctcgctctgtcacccaggctggagagtacagtggcatgatctcggctcactgcaacctccgcctaccgggttcaaatgattctcctgcctcagcctcccaagtagctgggattacgggtgcctgccaccaagtccagctaatttttgtatttttagtagagacaggattttgccaagttggcaaggctggtctcgaactcctgacctcaggtgatctgctcaccttggcctcccaaagtgctgggattataggcatgagccacctcgcctggcctttactgagttcttaaaggctgagacaggaaaagaaaaatagtaaactctgtgcgtaatttcactattttcttgtttaactttatgactgtcctggagagggcagcatcattacctttaatttagagctgggacagggacagtctgtgacacttatcttgatattgaggaatggagtcagtcctccaatggagggaggccgattgaggtgtgatactgagtgccccatcagttgttcaagggctggggcagatctaatattgtgtctgtactggctgatacttaggtggccagggccccagctttggaaacctgtgatggctgctaccacctctggctttgctaggcgcacacatctgcccagactcaatgtattgcaaacccatgcaacctccaggcccacactgagaatcaagaattgtggactcttgattctccaaatcttctcaaaagcccagctgctggctgggtacagtggctcacatctgtaatcccagcactttgggaggacgaggcgggcggatcacttgaggttaggagttcaagatcagcatggccaatgtggtgaaaccccatgtctactaaaaatacaaaaattacctgggcatggtggcaggcacctgtagttccagctacttgggaggctgaggcaggagaatcgcttgaacccgggagacggaggttgcagtgagccgagatcgtaccactgcactccagccttggtgacagggcgagactctctctcaaggcttgagggctgagtgaacactccttaactatttccagttatagccacgggtcgacttagatcaacagaagtctgtatggattactctaatagagtgcaaaaagatctgaactaggacctcattgtgaattcggatcctaccccttaccagctgtgtgaccgtgggcaagacacagaatctctgagctgtcactgccctctctgtaagtgaagtggcacccacttcttatgtctgtgttggtcctcttctcctaattgacactcactcgtttttcgttgttttttttttgagacggagtgtcgctctgtcgcccagactggagtgcagtggcacgatcttggctcactgcaagctccgcctcctgggttcatgcaattctcctgcctcagcctcctgagtagctgggactacaggcgctcgccaccacgcctggctaatttttcgtatttttagtagagacggggtttcaccgtgttagccaggatggtctcgatctcccgacctcgtgatctgcccgcctcagcctcccaaagtgctgggattacaggcgtgagccatggcgcctggccactcttttttttttttttttttttaactttgagatagaatcttgttctgtcacccaggttgaagtgcagtggcataatcctatctcactccaaactcaaactcctgggttacagcaatcctcccacttcagcctcccaagtagctgggaccacaggcacatgcccccctgcctggctaatttttaaaattttaagtagagatagggtctcaccgtgttgcctaggctggtctcaaactcctgggctcaagtgatcctcccaccttggcctccaaaagtgttagggttacaggcatgagccatggtgcctggtgacactcactcttgagttgagctcacacagacccctggctttaaatatcatccaaatgttgatgtcccccaagttttcatcttcactgcagacctcttctgtgagcttcagaactgctcacttgaaacttccccttgggtgtctgacaggcaacacaaacttaacatgtcccaacatgaactttttttttttgagacagaatcttgctctgttgcccaggctggagtgcagtggcctgatcttggctcactgcaaactccgcctcccaggttcaagtgattctcctgcctcagcctcccgagtagctgagattacaggcacgtgccaccacacccggcaaattttttgtatttttagtacagacagggtttcaccctgttggccaagctggtttcaaactcctgagctcaagcgatctgcctgcctctgcctcccaaagtggtaggattacaagtgtgagccaccgtgcccgggcccaaaatgaactctttatcttctcccccatacctgctcctcctgcagccttcccatatcagaatacaacaattctattcttacagttggtgtggccgaaaaccttggtgttgtcctcaatcctctctcacacatccccaaatccaatctgtcaagaaaccctggtgatcacttgagcccaggagtttgagaccaacctgggcagcatagcaagaccctgtctctacaaaaaatacaaaaatcagcggcagggcgcagtggcttacgcctgtaatcccagcactttgggaggctgaggcaggcagatcacaaggtcaagagatcaagacaatcctggccaacatggtgaaaccccgtctctactaaaaatacaaaaattagctgggcatggtggcacgtgcctgtagtctcagctacttgggaggctgaagcaggagaattgcttgaaccagggaggcagaggttgcagtgagccaagatcgtgccactaccctccagcctggtgacagagcaagactctgtatcaaaaaaaaaaaaaaaaaaaaaaaaaaaagctgggcatgatggcacacacctgtggtcccagccactcaggaggctaaggtgggagggtcgcttcagcccagaagttggaggccgcagtgagccataattgcaccagtgtactccagtctgggccacagaataaaactctgtctctagaaaacagaacaaaacaaagttgaagctctctaaactctccacactgactcagagtgaaagtgctaataatgacctaaagccgtgccctatggccccctttcctcttgacttcgcttttcatgcactctgctccagccatactggcctccttgggcttcccagaacacgcgaagcaggacccaggttagggcctttgaactggctttgtttgtccgtgggattccccatgaacatctcatggctgctccctctcttccctcaagtctcccctcagatgtccccttctcagagacatcagcctgtagaaaggagcacttccttcccccactttcctgcgtgatgtttctccatgatgcctgcttcctacatatgtagagtctgtctcactccggagaaggctacctccaagaggacaggtgactggcccttgatttcattaattgtcacaatcctatgccggacacatggttggtgttcaacaaatatttgcggaattaaagaacaaattaataatgttgtgagataaatactctgtgcccatttttctttactttttaatatattttttaaatctagagagacagggtctccctatggtccccaggatggcctcaaaactcctcctgccttggcctccttggctgggattactggactactactgtgccaccatgcctggctcttcttttccttttactatgcccattttaaaggtgaggaaaactgagactcagaaatgttcccaagggcacacagtgagtggtggctgccttcaggttggtctgactccagtgcccaagcctttctcaggagtggtgtgttgcccatcagccattatatccatgacatcaactggcataagatatgttcttatatgaaaattaattttagaagtgagtgtcacgaaatattgaccttctctaaggaactagttcttatagtcaaaaaggaggaacttatgtaaattttccctttcagggccagccccaggaagttcagagcctaatgtggtgttcattctattaattttttcttaccctgggacttttttctttctttcatttatgttaacctaatcaccagctgcttcctgttccttaggaaatagctaagtcgtacatgacacttttggggttccagtgtgcccggcatgggttttctttcattgggcaggcactaggtgggcttttcagcctgaagacgcatgtttctcatcagagtgagaatgatctctgatcattctccttcttccatttcttgggttctctcttcctggcactcctattggttagcttttgggcctcttggattgcctggctgtgtctctgtggcaaagactactcattatccaaaatccaatgagcccttcttccccaagaacatggtggaactgcatgtcccagcctcccttgcagtaggcatggtcatgtgactaagtttccaccaatagaatgtgaggaggtgatgtatgtgacttctggtctttggccttaggaagtaggccagcttcatactctccattcctgctggctggagatccccacaacagattcaaacgtgcaggtgacaaacggtgccctaccgatggcagaaaagtgatgaggaagggcccttggtccctgagcaatgagagaagcagagctgcctccctaactaccaccatttcacttgaacatgtctcttcttttgtttatttatttatttgttttttgcagacacgtctcttcttttttttttttgagatagagtctcactctgtcccaggctggagtgctgtggcacaatctcggctcactgcaacctctgccttctgggttcaagtgattctcctgcttcagcctcccaagtagctgggattacaggcatgcgccaccatgcctggctaatttttgtatttttagtagagacggggttggccaggatggtctcacactactgacctcatgatccacccaccttggcctcccaaagtgctgggattacaggtgtgagcaactgcgcccggccgacacgtctcttctttaagccgccacttattggatctctatgttagagcggcagtctcatatattttctctcatattttcttctccacccctacaccttctgggagttctattttctgggataattaattaattaatcaatttttgagatggggtctcactctgtcccaggctggagtgcagtggagcgatcttggctcactgcaacctctgcctcctgggttcaagctattctcctgcctcagcttcctgtctcaaactcctgacctcgtgatccacctgccttggcctcccaaagtgctgggattacaggcgtgagccaccgcgcccagctttatttattttttaaattttttattcttgagacagagtctcactctgtcacccagggtggagtgcagtggcataatcttggctcatggcaacctccgcctcccgggttcaagcgattttcctgcctcagcctcccaagtagctgggattacagacgcctgccaccacacctggctaatttttgtatttttagtagatggggttttgctacgttggccaggctgatctcgaactcctgacctcaggtgatccgcctgccttggtctcccaaagtgctgggattacaggcatgatccaccacacctggcagttttctgggataatttattaactttttattacaacacttcctgtttgtgtttgtacagatgaggccttgctatattacccaggctggtcttgaacttctggcctcaagccattctccttggcctcccaaactgcaggaattacaggagtgagctactgtgcccagcttctttattctaatgcttttagtaattcagtatcatagctttaatttctaagaattcagtctttgctctatttatttatttatttgagatggagtctcactctgtcgcccaggctggagtgcagtggtgtgatcttggctcactgcaacctcctcctcctgggttcaagcgatcctcctgcctcagctcccagaatagctgggactacaggtgcctgccaccacacccggctaaatttttttttgtatttttagtagagacagggtttcaccttgttggtcaggctggtctcgaactcctgtccttaggtgatccacctgcctcagcctcccaaagtgctgggattacaggcgtgagccactgtgcctggcctctttcttttttataacaccctgtttttattgtaacatagtgtagcaattttttttttctttgagatggagccttgctctgtcgcccagctggagtgcagtagtggatctcggtttaactgcaacgtccgcctcccgggctcaaatgattctcctgcctcagcctcccgagtagctgggattataggcacctgccactgtgcccagctaatttttgtatttttagtagagacagcgattcaccatgttggccaggctggttcgaacccctgaccccaggtgatcagcccacctcggcctccaaaatgctgggattacaggtgtgagccactgcacctggccagcaatatcttttttttttttttttttttttttttggggaaagagtcttgctctgtcgcccaggctggagtgcagtggcgcgatctcggctcactgcaagctccgcctcctgggttcatgccattctcctgcctcagcctcccgagtagctgggactacaggcgcccgccatcacgcctggctaatttttttgtatttttagtagagacggggtttcaccatgttagccagaatggactcgatcttctgatctcatgatccacctgcctctgcctcccaaagtgctgggattacaggcgtgagccaccgtgcctggcccatctttttttttttttttaatatggggtcttgctctgtcacccaggccagagtgcagtggcatgagcacagctcactgcagcctcaaatacccaggctcaagtgatcctcccacctcagcctccagagcagctgaaattacaggcacgtgctaccacgccctgcccagctaatttttttttggaagcagcaccttcatttattagggacttcggtggggatggggaaaggcggcccccgggtcagaggcgccggaagaagagcttggagccgtggtctaacgtgcactcgctggggcccagctggctcccgcccagctctttttttttttttttttttttttttttgagatggagtctcactctgtcgcccagactggagtgcagtggcgcaatcttggctcactgcaacctctgcctcccgggtttaagcgattctcctgcctcagcctcgagtagctgggattacaggcacccgccaccacacctggataatttttgtgtttttagtagagatgaggtttcaccatgttggccaggctggtctcgaactcctgacctcaggtgatccacctgcctcggcctcccaaagtgctgggattacaggcatgagctactgtgcccagccccgcccagctaattttttaattttttgtagagacaggatctcactatgttgccagggctggtttcaaactcctggtctcaagcgatcctcccgctttggcctcccaaagtgctgggattacaggggtgagcctcgtgcctggcctgaagcagcattttctcaaatgtctttaaaaataccagatttttttttttctttttctttttttcttttcttttcttttcttttcttttctttttttttttaagacggaatctcgctctgtcgcccaggcgggagtgcaatggcgcgatctcactgcaagctcactgcaagctccgcctctcgggttcatgccattctcctgcctcagcctcctggtagctgggactacaggcgcccgccaccacgcccggctaattttttttgtatttttagtagagatggggtttcaccatgttagccagaatggactccatctcctaacctcatgatccacctgcctctgcctcccaaagtgctgggattacaggcgtgagcgatcgcacccagcctctttttctttacgtaaattctgtttcctccaggattacttttcttttctttttcttttttttttaaatttttttgaatgtacttaggatgcatttggctacaaataactaaacatccgacttacaggaagctcacagaagggggtggctgggattcagggccccttgatcaggcatttgcgatgccttgggatcccatgctcttcctcccattcctcctctgcaatcctgcaatgtttccatcctggggccagttcctctcagagttacaggatgtatccttaatcatggcttgtgggaggcagaagttactgcccccgggttctcttttaattaaaaggaagaagcctttcttagaagcctcccttccttttatcttagtggctagaactggggcatgtaccctttcctaatgcaatcgtgggcagaaggggagtggttactttagactggtcagactttgctggagctgaagaaggaaggggtcagtgcccaggatgtgtatgctggtgggcacctgaacaaactggggtacttttaggaaagaaggaggcagaatggatgatggggttggtttatcttggtgctttcctttcatgttgcagggtttctttgaatgttgttgatatttcttccaggcgtgacggctcatgcctgtaatcccagcagtttgggaggccgaggtgggtggaatctcttgcgctcaggagttccagaccagcctgggcaatatagggagacctctgtctctacaaaaattagccaggcgtagcggtgtgcacctcccagttttgctgggaggattacttgagcccaggaagttgagttgaggctgtagtgagctgtggtctcaccactgtattccagcctgggtgacagagtaaaaccctgtctcaaaaaaaaaaaaaaaaaaaaggttgatatttctttcaagtcccatcatacttcagagtgagccaataagaggctgactggggcttttggtaccagagtagagctttccaacttgagggttggactttcatatcaagtgtgagaataaactaaagacctatttaggtgcaagattactttgggcacggtggctcacgcctgtaatcccagcactttgggaggctgaggggtgacgatcacctgaggtcagtagttcgagaccagcctggccaacatggcgagaccccgtctctactaaaaatacaaaaattagccaggcatggtggcgcctgcctgtaatcccacctactagggaggctgaggcaggaggatcgcttgaacctgggaggcagagtttgcagtgagccgatattgccccactgcaccccagcctaggtgacagagtgagacaaaaaaaaaaagcaaagttcacctttttattagggagctttctttggatgtgacttgaaaatgtgctcctgcaaaattaagagggtaaatcacaaaagagaagggtgcagactacaggaaataggagatcccacccaagagagaaataaccactggtcccaagatgtagcagtgtagcaacagggagtgggaggggagaaggaaggtcacactggagcaaggaattagtgaagcaattagaaactctaggtaaaattaaaagagatgtattgtagtaaatttactatgatacattatcgtagtaaatatcgctaaaattttatatatatatataaatatatatatttatataatataactgaacaatagttatataatgctttttttttttttctgaggtggcatcttgctctgttgcccaggctggagtacaatggcacgatctcagctcactgcaacctccgcctcctgggttcaagcgatcctcctgcctcagcccccctagtagctgggattacaggcacgcgccaccatgcccagctaatttttttatttttagtagagatggggtttcaccatgttggccaggctggtctcgaactcctgacctcaggtgatccacccgcctcggcctcccaaagtgctgttattacagacgtgagccaccgtgctaggcatttttttttttttttttttagagacatggtctccctttgtcacccaggctgcagtgcagtggtatcatcatagctcactgcagtcttgaacttctgggctcaagtgattgtcccgtctcagcctcctgagtagctgtaagtacaggcatgtgctaccatgcctggctactttttttctttttttctgtacagatggcaccttgctatgttgccccagctggtcttgaactcctgacctcaagtgatcctcctgccttggcctctcaaagtgctgggattacagacatgaggcaccacatccagccccataatcttaaaaacaaagaaaattaatagttttccattttagactcaaactctggaccagacagcactgatcttgactatctgaggtgatagaaatagcctttatctgtgttatttgatttgatagctactagccacatgtggtttctgaacacacttgaaatgtaactagctagttgcaactgagggaactaggttttaaatctcattaaattttaattaagttaaagtagtctcctgtggccagtggcttctacattaggcaatgcagctctaagcaagatgaaagagagaatgccaatattatctacatttaacaacataaaagtaaatgtacaggtaacagaaatgagcagaagagagataaaggaaagccactatcttcatgtcacaaagtgataagaatttaggccagaagctgtggctcatgcctgtaatctcagtacttttggaggccgaggcaaggaggatcgcttgagcccaggaattcaagaccagcctgggcaacataatgagatccctgtctctacaaaaaaaattaaaaattagctgggcatgatggtgcacacctgtagtcccagctactcaggaggctgaggtaggattgcttgggcccaggagttcgagggtgctcatctctttaaaaataagtaaataggtcaggtgaggtggctcatgcctataatcccagcactttgagaggctaaggtggacggattgcttgagcccaggaaattgatctcagcctgggcaacagcgaaacaatgtctctacaataaatataaaaagtaaccaggtgcatgccgggcgcggtggctcacgcctataatcccagcactttgggaggccaaggcagggtggatcacaaggtcaggagatcgagaccatcctggcgaacacggtgaaaccctgtctctactaaaaatacaaaaaattagccgggcatggtggcgggtgcttgtagtcccagctactcgggaggctgaggcaggagaatggcgtgaacctgggaggcggagcttgcagtgagccgagatcgcgccactgcactccagcctgggtgacagagcgagactccgtctcaaaaaaaaaaaagtaaccaggtgcggtggcacacacctgtagttccagctacttggaggctgaggtgggaggatcactggagcccaaggttgcagtaagctgagatcaggccactgcactctagcctgggcgaaagagtgagaccctgtctcaaaacaaaacaacaacaataataaaactcatacataactacgtaaataaagttacaaaagcaactttagttcgttacaaaggacctgaagagagggatttaactgacctgcaaggtggaatggggctggagcagggccagtgggtcagacacctatgattatgccaggcaaaatggatacatgaagaaataaagttatagcatctccatgtagtaatagaaaaaaaaaaggaataacgaaattagcacactttttgggaatgtggacccaccagtagaattgagactagaaaaagttaaaagcattagaagtgttctctttctgagatcatgacttgttggggaaagggaagacttattgttcatgacaaacacttctgtgcttataacatgcattagcttaggaaacagcacttttctttttctctttttttttttttttttttttttttgagacaaggtcttgctctgtcgcccaggctggaatgcatgttgcgatctcggctcactgcaacctctgcctcctgggctcaagcgatccttccaccttggcctcccaaggcgctgggcgctgggattacaggcatgggccaccgtgcccggcctggtgcttttcagtgaataaataagtatgtaaacttctcttttctgactagacggaaattccccagaggacaagggtggcgtgacttgtcagtccttttcattgacagcgctgtggatgggaagaaagggcccctggtcccaagcaagccccagtcctgtggccctggaggatcagaagggtaattaagtgtcaaaggaaaacatagccagacatgagttactgtggtgaaaacagattttattcagtaactactcgtggtaggagaaagagctgagctccattctgatttgtgcagaggtgatttaggcatttaattagttaattagtttttgtgggacagggtctcgatctgttgcccaggcttgtgattgtgcctgttgctcagattgtgcagtggcacaatcatggctcactgcagcctcgaactcccaggctcaagtgatcctcctacctcagcctcctgagttagctgggacccacaggcgtatgccactgcacctggcttttttttttttttttttttttttttgaaacagagtctcgctctgttgcccaggctggaatgcagtggcatgatcttggctcactgcaaccaccacctcctgggttcaagcaattctcctgcctcggtctcctaagtagctgggattacaggcgcgtgccacaatacccagctagttttagtttgttttttatttatttattttttttagtagaaacgacgtttcaccatgttggccaggctggtctcgaactcctgacctcaggtgatccacccacctcggcctcccaaaatgctgggattacaggagtgagccaccgcaccagtgtctctctcttataacaccagctagtccttatcaggctttgactgtgggcccctcacctgtctaacttatccttcccaggaactttgaagaatactattattattcctattttgcaaatgaagaaactgaggcagattaaatgcctgacccaaggccatccagacggcaggcgatgcaggcaggagtcaagctcaggtacccctccccttctgtggcttccctgcctccaggcttctgccagcccctgtctaccttggtgtaggagcggcccctcaaagacctgcagggagccgggcacggtggcgcacgcctataatctcagcactttgggaggctgaggtgggcgtatcatgaaaccctgtctctactaaaaatacagaaattagccgggtgtagtggtgggcacctatgatcccagctactcagaaggctgaggcaggaggaacgcttgagaaccccagaggcggaggttgcagtgagccaagatcgagccactgcactccagcctggacgacagagcgagactccatctcaaaaaaaaaaaaaacctgtagagggaaggaggaactggggcctggggagggcagagctattatctcaggagaagcaggcaaacctctggtgacctctgatgacctcagggcaggatgggcaggccttcacaacagctccaggcacacccagcctcccgtccctggcctcatcactcccctctctgccctccaccctttggcctccttgcctttgtccacagttctgcagcctgataccctcttccttgtctcaaccagagaagtcttcagtcaataaacgtcatccaatgcctactgtgtgtcaagcacttcctgggtgctggggcactgtgcaagcacacacgcacagctgtgaggccatggggctggcattccagtgtggggagagcgacggaagcaaaataagaaagtccattacatggcgcatttgaaggcgcgaagtgctatggggagaaagcaaggaggggggttacagtccagagggaggggggtgcgattttttttttttttccagacggagtcttgctctgtcacccaggctggagtgcagtggcgtgatcttgcaaactccgccgcctgggttcacgccattcttctgcctcagcctcctgagtagctgggactgcaggcacccgccaccatgtccggctaattttttgtatttttagtatagacagggtttcaccgtgttagccaggatggtcttgatctcctgaccttgtgatccacctgcctcagcctcccaaagtgctgggattacaggcatgagccaccgcgcccacccgggggtgagattttaaatacaatggccagctgggctccgtggcacacacctgtaattccagcactttgggagaccgaggtgggaggctcacttgagtctaggagtttgaaacaagcctgggcaacaaagcaagatcccatctgtatgaaaaatttaaaaattaggccgggcatggtggctcatacctgtaatcccagcactttgggaggccgaggagggcagatcacttgagctcaggagtccgagaccagcctggccaacatggtgaaacactgtctctactaaaaatacaaaaaaattgctgggcgtggtggctcacgcttgtaatcccagcactttgggaggccgaggcaggtggatcacctgaggtcaggagttcaagaccagtctggccaacatggtgaaaccctgtctctactaaaaatagaaaattagatgggcttggtggtgggcacctgtattcccagctactcaggaggctgaggcaggagaatagcttaaatccaggaggcggaggttgccgtgagccgagatcgaaccattgtgctccagcctgggcaacgagagtgtgaaactccatctcaaaaataaaaataaaaatacaaaaaattagccgggcatggtggcgcgcacctgtaatcccagctactcgggagactgaggcgggagaattgctggaactcgggaggcggagttgcagtgaaccaagattgtgccactgcactccagcctgggagacagagcgagactccatctcaaaaaataaaaaattaaaattaaaagttagactggtgtggtggcatgtgcctgtagtcccagctacttgggaggccaaggcgggaggatctcttgagcccaggaggtcgaggctgcagtgagccatgattgtgccaatgcactcaagcctgggtgacagagtgagaccctgtgtctaaaacaaacaaataagtaagtaaataggttggccaggcaaagccatcctgagaaggtgacatttgagcaaagactgagaaagcagccaagcaacatctgggtggggagccctggggcagccaccacagatggcgcaaaggccctgggcttgctttctccagggacacatcagaggtccgggtggcaagggcgtggatggcagggccatgggtggaagggcagaagcaacgtggataagagaggtaggcaggggtcagatcggatgtggccaacttggcttctaccctgagtggggtgggagtggtctcagggctccaagcagaggaggggtggggtcagatgtttcatctgggtccctctggctgctgtgtggaaaacagcccggaggaggatgagatctcacacagggagaccagagctgagatgactgcaccagtccaggccagagaagacagaggctcaggccagtaggcagcagtgacggggcgaagagggatcagattctggatctttctctctctctctctctcttttttttttttttttttttttttttttttacagacaaggtatcactgtgttacccagggtggagtacagtggcgaaatcatagctcactgcagccttgaactcctgaactcaagcgatcccttctcctgagtctcccaaagtcctgggattacaggagtgagccactgtgcccagggcaggttatacattttttttgggaacaccacagaagccaagcacagtggctcatgcctgtaatcccaggacttctggaggcgaagatgagaggattgcttgagcccaggagttcaagaccagtctgggcaacacagcaagaacccatctctaaaaaaaaaggaatactgctgggcacggtggctcatgcctgtaattccagcactttgggaggctgaggtgggtggatcacctgagattaggagtacgagaccagcctggctaacatggcgaaaccccatccctaataaaaatacaaaaattagctgggcatggtggcagggacctgtaatcccagctattcaggaggctgaggcaggagaattgcttgaacccaggaggcggaggttgcagtgagccgagatcacatcactgcactccagccagggtgaccatgcccagccaactatgtaaatatcctatacacacacactcttctgatttcaccaatggttttaacactcactcttacctgaatccattattattatattggttatgtttatcattttttaaattctacattccttttacaattgttagctttcctacagtaaaataactttccagtggccgggcacagtggctcatgcctgtaatcccagcactttgggaggccgaggcaggtgaatcacgaggtcaggagttcgagatcagcctggccaacatggtgaaaccacatctctactaataatgcaaaaattagccaaacgtggtggtgcgcacctgtaatcctagctacctgggaggctgagggaggagagttgcttgaaactaagaggcggaggttgcagtgagccgagattgcatcactgcactccagcctgagcgacagagcaagactacatctcagaaaaaataaaacaaaaacaaaaaaaacttccatactgtcctacctcccttccctgctccctccctccttctctttgtctctaatattttcagaatcagtatgaactcattttcttttcttttttttttttttccaagacaaattctcactcttttgccgaggctggagtgcagtggcatgatctcagctcattgcaacctctgcctcccaggttcaagcgattctcctgcctcagcctcccgagtagctgggactaccggcgcccatcaccacacctggctaattttttggtaatttttagtagaaacggagtttcaccatgttggtcaggctggtctcgaactcctgacctcaggtgatcctcccgtctcggcctcccaaagtgctgggattacaggcatgagccactgcgcccagcctctttttttcttttaattaaaacaattaaatagagatggggttctctgtctgttgcccaggttggtcttcaactcctgggctcaagcaatcctcctgtctcgggctcccgaagtgctgggattacaggagtgagtcaccacgcccagcctaagtattgctcttctgtgatgatttgcaggcaacaatcacctcttgttcatattttcattatctttccctccaccccgagcctatagtctgtcttggtcagaccccatttcttgagtgcaccaggctggagtttggacccatccacatcctcgcagctctcctgagttggggcccaacatctggcttggggaacagacagctttgccgacagcagtaacaatttggttgaaatgataactttgtcaaaaatgaattttgccttagtgtttttttaaaggttgagaatcttgtacattcttacaacatttctattttctacagttaaaaaactgtaggctgggtgcagtgactcactcctgtaatcccagcactttgggaggccaaggtgggtggattgcttgagtccaagggttcgagaccagctaggcaacatagcaaaatattagctaggtgtggtagctactcgggaggttgaggcaggagaattgcttgaacccaggaggcagaggttgcagtgagccaagatcatgccactgcactccagcctgggcaagagagctagattgtctcaaaaaaaaaaaaaagtaagttccaattactttgcagccaattattcttgctcttctatttgcaatagcagaagattgaaatagcctcctagatgtctgacagtggaatgggttcttttctttttcttttttggtagagatgagggtctcactatgtggccaggcaagccttgaactcctggcctcaagtgatcctcccgcctctggaggcaggaggtagggtacagtcccagactcaaagcactgggattacaggagtgaaccactgcgtgagcctggtttcttttctttcccctccctcccttccttccttccttccttccatccgtccttccttccttccctccttctctcctctttcactctacctctttcttttcttcttttttctggcttgttaaaacagaaatacataataattatagtgaaataaactagggtatttactgcagcagttagtaataatgaaatgttggaaaacaatctaatgttcatccgtagggaatatttaaaatatagtgtatttctgccgggcgcggtggctcacgcctgtaatcccagcactttgggaggccgaggcaggtggatcatgaggtcaggagatcgagaccacggtgaaaccctgtctctactaaaaatacaaaaaagttagccgggcttcgtggcgggcgcctgtagtcccagctactcgggaggctgaggcaggagaatggcttgaacccgggaggcggagcttgcagtgagcagaaatcgcgccactgcactccagcctgggcgacactgtgagactccatctcaaaaaaataaattaattaaaaataaataaataaataaaatatagtgtatttctggccgggcgcggtggctcactcatgtaatcccggcactttgggatgctgaggctggcagatcacaagatcaggagatcaagaccatcctggctaacgcggtgaaaccctgtctctattaaaaatacagaaattagctgggcatagtggcatgtgcctgtagtcccagctacttgtgaggctgagacaggagaatcgcttgaacctgggaggtggaggttgcagtgagctgagatcgagacactacgctccagcctgggtgacagagcaagactccgtctcaaaaaaaaaaaaaattatagtgtatgccatggaatattatgcaactgttatatatgtgtgtgtgttcccaaagcattgttcagtaacaaaggaaaagtgcaaaacactaaaatggatgaatacatgcttgtgtaaacacagacactgtcaggaatgtttgtctggaggtgatgggtatggagcctttttgtctgatatattgggtgtatcaagaatgccaggtcctgagcagttttttttttttttttttgagttggagtctcactctgttgcccaggctggagtgcagtggcacaatctctgctcactgcaacctccacctcctgggttgaagcgattctcgtgcctcagcctcccgagtagctgggattgtaggcgcccgccaccatgcccagctaattttttgtgtttttagtagagacggggtttcaccatgttggccaagctggtctcgaactcctgacctcaggtgatctgcctgcctcggccttccaaagtgctgggcttacaggcatgggccaccgtgcccagccgtttatatgtattaactcttaatcatcaaaacaaactatgtggtattaccataattatcgccatttatacaaagcaacagagggataaggagattaaggcacttgcccaagtgcaagaggtaggacaggaacccagagtcccgtgctggtagctgcttttctgtgcacttaacattatctcatttaattcttgcagtcacttcatgaagaaggtggcggtcctagggcattggagaagttatgtgcttgttcaaggtcatgcagctggaagatggtggtggtaggacaggaagtctgtagggcctgattctgcagccctctagtctatactcctttgctcctgtgtccctcatcccccctgcagaatgggcaccccgttacctttctgagccactgtgcgcagaaaagagagcatgttggccaggctggtctcgaactcctgacctcaagtgatcagcctgccttagcctcccaaagtcctgggattacaggcgtgaaccaccacgctcagcctctgaatactttgtactcaagccatttttcagtgctgtgtttgcagtgagcacacccgagggatgaagacacgtctccctgtgggaacctgggcttaccagggcccctagaggaggggaatctctcaagctcagagctctatggctgcggtgcaggcccactgtgtgcatggtgtcagtctgggcccttccatgttgcccccgtgggacttggggtaaggggaactgatgcaaacatcacgctgctgttgcttggtgtgagcaattaattcctgtggctctcacccaggagtctcatgtctttgggtcagacaaactcatcagcttgtagaaatggcacagtcccacgggcctgttagaatcttctattgtgcacatgttgctcttaaaatatacaaatcagttttgattttaaaaaattatttatttttttagtgataggagttttgctacgttgcccaggctggtttcaaactcttgggctcaggaggtcctcccactttggcctggactgccagcataatgtatcaccacacccgggactgattttcgtttttcaagaacaaaaaccaaaaacatacacaaaccgagagtcaaagcttgctaattagaggaaagtcaggaaatgggaaccattcaaagaagaaaatacccccacctcctactctcacctatccaaagacaattaggtgaatcccttagtagatatctttccagacggttttccatatagattcccatatctggccaggcgcggtggctcacacctgtaatcctagcgcttggggaggctgaggcggatggaccacctgaggtcaggagttcgagaccagcctgaccaacatggagaaacctcgtctctacgaaaaatacaaaattagccgggcacagtggtgcaagcctgtaatcccagctactcaggaggccgaggcaggagaattgcttgaacctaggaggcagacattgtgctgagccgagccaagatcatgccattgcactaaactccgccttaaaaaaaaaaaaaaagattcccacatctttactagtttgcagaaataagatcctagcatatgcagtgtgtaggaaccaccttggtttagccacgtctctgtgactgggggccactgtggtgacccccagctccccggacagagtcaagagctcaccagcctgcaaaggttttcacggcccccagccagactcgggggcttcctcttgccctgctacttcctgggagctctgagggcaggaaatggcgccactcagctcctggcctaacagcttggggaccacaaatgcaaaggaaaccaccctcccctcccacctcctcctctgcacccttgagttctcaggctcacattcccaccacccacctctgagcccagccctccctagcatcaccacttccatcccattcctcagccaagagccaggaatcctgattccagatcccacgcttccctgcctccctcaggtgagccccagacccccaggcaccccgctggcccctgaaggagcaggtgatggtgctgtcttcgcccagcagctgtgggagcaggcgggtggggcaggatggaggggtgggtggggtgggtggagccagggcccacttcctttccccttggggccctgtccttcccagtcttgccccagcctcgggaggtggtggagtgacctggccccagtgctgcgtccttatcagccgagccggtaagagggtgagacttggtggggtaggggcctcagtgggcctgggaatgtgcctgtggcttgaaaagactctgacaggttatgatgggaagagattgggagccattgggctgcacagggtcagggaaggccaggaggggctggtcactgctggaatctaagctgctgaggctggagggagcctcaggatggggctgatgggggagctgccagcatctgttcctctgtcatttctgataacagtaaaagccagcatggaaaaaaccgttaaaccgcaggttgggcctggccgttggcagggaagtgggcagaggggaggcccggccaggtcctccggcaactcccgcgtgttctgcttctccggctgcccacctgcaggtcccagctcttgctcctgcctgtttgcctggaaatggccacgcttctccttctccttggggtgctggtggtaagcccagacgctctggggagcacaacagcagtgcagacacccacctccggagagcctttggtctctactagcgagcccctgagctcaaagatgtacaccacttcaataacaagtgaccctaaggccgacagcactggggaccagacctcagccctacctccctcaacttccatcaatgagggatcccctctttggacttccattggtgccagcactggttcccctttacctgagccaacaacctaccaggaagtttccatcaagatgtcatcagtgccccaggaaacccctcatgcaaccagtcatcctgctgttcccataacagcaaactctctaggatcccacaccgtgacaggtggaaccataacaacgaactctccagaaacctccagtaggaccagtggagcccctgttaccacggcagctagctctctggagacctccagaggcacctctggaccccctcttaccatggcaactgtctctctggagacttccaaaggcacctctggaccccctgttaccatggcaactgactctctggagacctccactgggaccactggaccccctgttaccatgacaactggctctctggagccctccagcggggccagtggaccccaggtctctagcgtaaaactatctacaatgatgtctccaacgacctccaccaacgcaagcactgtgcccttccggaacccagatgagaactcacgaggcatgctgccagtggctgtgcttgtggccctgctggcggtcatagtcctcgtggctctgctcctgctgtggcgccggcggcagaagcggcggactggggccctcgtgctgagcagaggcggcaagcgtaacggggtggtggacgcctgggctgggccagcccaggtccctgaggagggggccgtgacagtgaccgtgggagggtccgggggcgacaagggctctgggttccccgatggggaggggtctagccgtcggcccacgctcaccactttctttggcagacggaagtctcgccagggctccctggcgatggaggagctgaagtctgggtcaggccccagcctcaaaggggaggaggagccactggtggccagtgaggatggggctgtggacgccccagctcctgatgagcccgaagggggagacggggctgccccttaagtgtcggtgaatagtgaggctggaggccggaatctcagccagcctccagcaccttccctctcaccatcccactgccccctcgctcccatgtttccacccggcaccctgatcctcacccgaatctcctttttttttttcttttgagacagagtttcgctttgtcgcccaggctggagtgcaatgcacgatctcagttcactgcaacctctgcctcctaagttcaggcgattctcctgcctcagcttcccgagtaactgagattacaggcacccaccaccatgcccagctgcttttttgtatttttggtagagatggggtttcaccatgttggctaggctggtctcaaactcctgacctcaggtgatctacctgcctcagcctcccaaagtgctgagattacagacatgagcctccgcgccttgcctcctcacccacctcttcactctgaatcctcatgaggcttctcagccctggatttcctgctgccatcctcacccagcacccacaactagcgcctgggcagggcagggctggcacctctcaacgtctgtggactgaatgaataaaccctcctcatccacccctatttatctccatcaccatttccccctctttcttgttcctggaaacggctgctgagtctccatcggccaaacttatctgccctgtgatttctttgacaattctccttttcccccagaacccaccctgggttgaccagagtctgggaagaaggacaagagaacccggcaaactccctcctaggattaactttgtaaagcacccttgccctgtagctgcaagggctgtggaacctgggcagcccgcaaccacctttagctctgggccccccaggccagcctggagcatggctgggtggggccaccagcccatgctctcaggcgggcctgtgatctttcccagggcacatggactgtaggctggccctggcccacaccaccacactctccccagccatggacagaggcagccagaggcctcacggtttctcctccgagtttctggctgggtgtagttctcagaaaccccagtgcctgcgtgtgtccactcgtgggtgtggtttgtgtgcaagagctgaggatttggcgatgcttgggaggggtagttgtgggtacagacggtgtgggggtgggaagtggtgcagagactgaagagggtcaacctgggcatgggggacacagggactgctgagaacgtgcgtgtcatctttgctctgatggggtggacatagcagaaaatctaactctgtctgtagccccatacagaatgccagggtgagcacagtggctggtgcctttaatcccagcactttggaaagttgaggcaggaggatcgcttgagcccaggagttcgagtctgaagtgagctgtgattgcaccactgcacttcagcctgggcaacagagtgagcccctgtctcaaaaaagaaaagaaaaagaaagccaggcttcatggaaagatcgtatgtgtgacccaaatatgagttcttcagctcagccatggtaatcccttccttgaagtctccatttctgcagtacacatgcatgtgcgctctctctctctctctctctctcacacacacacacacacacacacacacacgcgcgcgcgcgcgcgctctcctgcgaacagaggcagggggagaggggtttgccctggtctcggggactggtctggctggcgcttccccactgcacgtttccaggtttagtttgtctgtgtctcctcttccatcccaggggctgagccccttccatcctccaagaggaaccagtgagagtgagtgaaggaggggcctggagccagggacttcccctgtggggcctgggtggagaggggagaactcaatggtgctgcctttgagaccagcccaggctacagcccaggagcacacatgggccagggcagttggtatttcccgaggacaaagaggaaattttcaaagaggaagttgttgagttagagcttgcggtggctgagagcagacaggttgacctgcaaaaaaagacaggggaggcatgtgagtgtgacagccctgctctgtggcctgggcaggagatgggggaaagggtcaggtgggggatgggctcgtgcagtgggagaggagacggagggagggagcgggaaggggcttgcttagtgggtgggaagagctgagctcggatggaaccagcttctaccagccaggctgggcacccactgggctgcatctggtggccttttctgattgctatttggactcactgcagctgcagaatgacagaggccatgtccaaaatcccttagagacactgttgtcttagagttgttaaaataagagcccccatatcaggtttagaaaatactgtcaccgaacgaacgtcgctgtcctcagctccacctccctttcctttgacagatatggttgttttctaagccaggactggttttagtcaggtcctgggcgaatcctgaaaaaaagaggtagtacgggtaaggaaggcacccaacagggctttcacaatccagaaaatatcaaaatataagtgttaaaagagaggcacaggccgggtgcggtggctcacgcctgtaatctcagcactttgggaggccaaggtgggcagatcatgaggtcaggagtttgagaccagcctggccaatatgatgaaaccccgtttctactaaaaatacaaaagttagccaggcatggtggtgtgctcctgtaatcccagctacttaggaggctgaggccagagaattgcttgaaccctggagtcagaggttgcagtgagccgggatcatgccactgtactccaggctgggtgacaaagtgagactgtctcaaaaaataaaaataaataaaataaataaaagagaggcacaaacagtgttatgaatgcaccaaggaaaatggtgcattcataactctcaggtgaagcctaccaagccatgcgtgtgtgcacatatgtgtgtacgtgtgcatgtgcgtgcgtgcatgtgcgtgcgtgcatgtgcctgtgtgtgtatgtgtgcacatgtgtgtgcgcatgtgtgtgtgtgcgcgcatgtgtgtgtgcatgcatgttctcccatgcatgtgtactgtggcaagggagactttgaggaagagattccagtggctgagcagaagggctcgcattgccctggcgaaaggttggaaggcttcacctgagagtgtgtcgtggcctttgtcatatccactgcttgattcctttctttaaaaattatttttattgttttctacatatgagaaccaccacacctggctaatttttgtattttttgtagagatggggtttcaccatgttgtcccggctggtctcaaactcccgggcacaagagatccacctgcctcagcctcccaaaatgctgggactataggcatgagccactgcacccagccactgcttcattcctggtggctgctgtgcctggcatgttgcagatcctccatgaatatgcatttgaatgaatgaatgaatgaatgaatgaatgaatggagatgacgcctcagagattctttcttttgagatgaggtctcattctgtcacccagactagagggcagtggtgcaatcacagctcaccacagcctcaacctcctgggcctcccaagtagctgcgatcacaggtgtgcaccaacatgcccagctaatttttttttttaatttttaatttgtacagacagggtcttgctgtgttgcccaggctggtctcaaactcctgggctcaagtggtcctcccacctaagcttccccaaatactgggattataggtgtgagccactgtgcccaggcttgcctcagatatttgaaggctgggaaggattttgcaaagctgggaaaaggaaaaggcattcccagcagaggggatagcaggtggaaatacataattaaaaaaaaaaaacgtggagcagatccagcgcagtggctcatgcctgtaatcccagcactttgggaggcagagcagggaggattgcttgagtctaggagttcaagaccagcctgggtaacatagaaagaccctgtctctacaaaaacacaaaaaattagccaggcgtggtggtgcatgcctgtagtaccagctacttgagaagctgaggcaggaggactgcttgaagccaggagtttgagaccagcctgggcaacatagtgagaccccgtgtctacaaaaagtaaacatttatatatatattttttaaagtggagcagttcaatatagagtcttttttgaacaaacgtgaaatagatgtcttttttttttttttgagatggagttttcactcttgttacccaggctggagtgcaatggcgtgatcttggctcaccagaacctccgcctcctgggttcaaacaattctcctgcctcagcctcccaggtagctgggattacaggcatgcaccaccaaacccggataattttgtatttttagtagagatggggtttcaccatgttggtcaagctggtcttgaactcccgacctctgctgatccgtatgcctcggcctcccaaagtgctgggattacatgcgtgagccaccgtgcccgacaatagatgtcttttaattttctggaggaaaaagcaaagcaaaagaagcagtggatattttaagactaaaaaggaaaacaaaaaaaggagatagagcaggccagacgtggtggctcaacgtctgtaatcccagcactttgggaggccgaggcaggtggatcacctgaggtcaggagttcaagaccagcctgaccaacatggtgaaaccctgtttcaaaatacaaaaaattagctgggcgtggtggcgggcacctgtaatcccagctacttgggaggctgaggcaggagaatcccttgaacccaggaggtggaggttgcagtgagccgagatcacgccattgcactccagcctgggcgacaagtaaaaaactccatctcaaaaaaaaaaaaggagatagagcaaggaacagtaagaaaatagttgggtgcagtggctatgcggtggcactataggaggctgaggcgggcagatcacctgaggtcaggagttggagaccagcctgggcaacatagacccctatctctacaaaaaatttgaaatatgaaaaattagccaggtgtagtggtgtgcgcctgtggtaccagctactcaagaggcgaaggcagggaagattgcttgagcccaggagtttgaggctatagtgagctgtgatcatgccactgcactccagcctgggcaatagtgtgagactctgtctcaaaagaaagaacatggccaggcgtggtggctcacacctgtaatcccagcactttgggaggccgaggcagtcagatcatgaggccagtttgaaaccagcctggccaacatggtgaaaccctgtctctactaaaaatacaaaaattagccaggcgtggtggcatgcccccgtaatcccagctacttgggggtctgaggcagaagaattgcttgaaaccgggaggcagaggttgcagtgagccgagatcgtgtcattgcactctagtctgggcgacagagcaagactccgtcttggaaaaaaatttaaaaaaagaaaatataaaatatggtataagattaaatatattagttatgaaaataattgtaaatggcttattgaacttatagtcagtaaaaatcatgtttttgaaaattatgtaatgactttggaaaataccagcaatataatgttaagtggggaaaaaagcaagttactcctctgtaatacatatgattttagttttgtaataaaaattcccaaccatatatgcacttatagggaaacaaaggacccatcgcaaatgttttccatgctgatctccaaagtggtgagtttatgtgtgatttttattttgtttatgctcttctgtattttccgaatttcatacaataaatatctgttacttttacaatatgaaaaaatagtggtcaaaaaggtgttcaagggggtggcctgggggtgtctggtttgaggagagtggtaggggatgaggctgcaagtggaggttggagccatgctatgaaaagttcaagagtttgaattgagttctgaggtttgtttttgtttttgtttttgttttttgagacggagtctcaccctgtcacccaggctggagtgcagtggcacgggttcatgccattctcctgcctcagcctcctgagtagctggaaccacacgcgcccgccaccacaccaggctaatttttttgtatttttaggagagacagggtttcaccatgttagccaggatggtctcgatctcctgacctcgtgatccacctgcctcggcctcccaaagtgctgggattacaggcgtgagccacagtgctctgcgtgagccatagtgctctgctgagagtttgaattgcattctggaagtagtggtgaaatcaacacacctaagtctgctcttctcctctcttctagtccccagagtggtgagtagcatcgttctggtggcccaggcaaaacgccttaggaccaccgtgcagccccactctttccccattcctgctctccaggtgccaagtccctggctcttcttccaccgacccttgcatcccttccttctcttcagtcctcatcgcacctcaccgggatcctattgacacttcccctttgatttccttccgctctctgctagtgatggtcccagggacccttctaaaaggtcactgtgggctgggcacagtggctcacgcctgtaatcccaacactttgagaggctgaggtgggccaatcatctgaggtcaggagttcgagaccagcctggccaacatggtgaaaccccatctctactgaaagtacaaaaattagccgggcgtggtggtgtgcacctgtagtcccagctactcgggaggctgaggcgggggaattgttggtccccgggagatggaggttgcagtgagccaagatcgcgccgttgcactccagcctgggtgacagaatgagactccgtctcaaaaaaaaaaaaaaaagaaaaaagaaaaatagctgggcatcgtggcacacacctgtagttccagctactcaggaggatgaggtaggaagatcacttgagcccaagaggtccagactgcagcgagtcatgatcacaccactgcactccagcctgcgtggcaccctgtctcaaaatataataataataaaatttaaaaataaaataaaacgctgctctgtctaggtgatattcctctatccccaaggctgtcagggtggaaccctccttccttagcgtggcatataagcccctcgggacctggccctatctctcctctgaccacccctgcccggtcagcccttgttacagacagtctgtgctatccagccccatcaaattcctgttgctccctaaatatgccacacactttatttggaggagaggggtgaagaagggtagtttaacatgttcaaaatatttattttttccagacagtaaaataacattttttcctgttttgcaaaagttaattatcagcacattgaagattttccttttttttcttttctttttttttttttttttgagtcaaagtcttgctctgttccccaggctagagtgcagtagcgcgatctcggctccacctcccgggttcaagtgattatcctgtttcagcctcccgagtagctgggactacaagcacatgccaccatgcccagctaatttttgtatttttggtagagacggggtttcacaatgttggccaggctggtcttgaactcctgacctcaggtgattcacccgcctcaccctcccaaagtgttgggattacaggcatgagccactgcgcccggccagcagtcttaaataacagaattcacacacacacacacacacacacacacacacacacacacgcactgtattatatttcatcttatactttaaaatgtttccttttttttcctcaaaagtacacattaagatcatgtttacaaataaagccttgtcatccaaagtgaaaaatccagatggcaagatttggatggggaaggtcttgagaaatctgcgaatggagttcacttttgcagacaggaaatgggccctaatatatggttctaaggacattccatttctgaaaatgtacatttccacccgcttttcctctccttccttcctccctccctccctccctctctctctctctctctctctttctttctttctgacaaggtcttcctctgtcgctgacgctggagtgcaatggtgcgatctcggcccattgcaacctccgcctcctgggctcaagtgatcctcccccctcagcctcccaagtagctgggaccacaggcacacgccacggcacccagctaatttttgtattttttgtacagatgggttctcaccatgttgcctaggctgatcttgaactgctgggctcaagtgatcctcccgcctcagcctctcaaaagtgctgggattacaggcgtgagccaccgcacctggcctgcatccccatttctgacccttgaccatgttcaagtgggaaggggaagccggggaagggaggacgggctacctgagggctgcgggtagaggtgactcctgtgagctgtgagccctcagcccttgggcagagggaacagaacagaaacagaccccatctctgagccaccaagctcagactcgtgtggcaggagacagatcacacaacactatcaacaaaacaacacaggtcgcagtggctcacacctgtaatcccagcactttgggaagctgaggtgagaggattgcttaaccgcaggagttcgagaccagtctggccaacatagcgagaccccatctctcaaaaaaagaaaaaaattagctgggcctggtgatgcacacctgtagtcccagctacttgggaggctgaggtgggaggacagcttgaaccagagaggtcgaggctgcagtgagctatgattgtgccactgccactgcactctagtctgagcaatagagtgagaccctgtcttccaaaaaaaaaaaaaaaagagagagagagagagaagaatataatcaaaagtttctaaattcccaaagtagtaacaaaagcagacccaaacaaaagtagagagaaaatcttcgaaacttaaaaggctatttaggctaaggagcccacccagtggtgaccacctagttctgggaggtttggggcagggccattagacaatggaaactcaggttattttggagacaatcaacttgctcccaaaaatgagctgcaagcaggtgcctgtgtgctcagcccagtctggagctcagagcctgcctgccccactgcaccatcaccagcccagctgaaccagggtcccaggcaagccgtacaggctctgcgttggccttggagagaaccgccgactcccccgagttgcctgagctcggcctgaagccagccctccccacgctggctcacaataaatgccttgacttcccgccaactcttcctcaaccattaagattcagctcaactgtcacgggctctgtgcagctgccctcgctgccccaccccacgcagactttgtgttccttctccactcctgcagcaccccttgcgacagcatgaataacccggctgtagtgatgtgagggtgacactcatcaccagtgtgtgagcccctccaaggccacatgtcctctttgtgtttccagagcccagggcccagcatgcggtagctacctagtatatgtttactgaatggagggatgaataaattcatgcacaaagaatagttttatttatttatttatttttgagacagagtcttgcttctgacacccaggctgtagcgcagtggtgcgatcttggctcattgcaacctctgcctcccaggttcaagcaattctcctgtctcagcctcccaagtagctgggattacaggcatgcgcgccaccacgcccggctaattttctatttttagtagagacgaggtttcaacatgttggccaggctggtctcgaactcgcgacctcaggtgatctgcctgccttggtcttccaaagtgctgggattacaggtatgagccaccgcgcctggccttatttgtttattttcataaacaaatttctgttgcccaggctggtctcaaactcctggcctcaagtgatcctcctgcctcagcctcccaaactgttgggattacaggcacaagccacagtgcctggcccagttctgtcctttgagttgacctggtcatccaggaggatgttctgaggaagtgtgaaatgataatattattctagcccacgctggatacagtggcagtctggaaggtgaaagaggttgggtttgaaatagatttattggccaagtgcagtggctcacacctgtaatcccagcactttgggaggccgaggcaggagaattgcttcagcctttaaacatggcgaaaccctgtccctattaaaaataaaaaagttcgatgggcgtggtggcattcacctgtagtcccagctactcaggagggtgaggcaggagaatcacttcagccctataggttgaggctgctttgtgctgtgatcatgccaatgcacgctagcctgggtgacacagtgagaccctgtttcaaaaacaaaaacaaaaacagaatagaggcctggagcttgagagggaactcaggatagaagatatagatttaagagtcggctggatgcagtggctcaaggctgtaatcccagcactttgggaggctagggtgggtgtatcacttgaggtcaggagttcgagaccagcctgaacaacatggcgaaaccccatctctaccaaaaataacaaaaactagctgggcatggtggcatgcgcctgtaatcccagctacttgggaggctaaggcaggagaatcacttgaacccgggaggtggaggttgcagttagccgagattgtaccactggattccagcctgggtgacagagtgagactccctctcaaaaaataaaaataaaaataaataaataaataaataaataaatagtgatacagatagatagatacataaattatatcattcactgggtagattgagaagagagctgtagagagaatctgagtgtaatagtcagggcaggctaactgctgtaagaaacagtgcccccacatctcagcggtataactcaaaagaagttttttccttcttatgacagtcaattcctgacatctggagcatgacctttcacaacattattccgggacccagtctccttccatctagtggctctgtcatcctcctagggccttggagtggtctgcttttgaccagctaatgggaggggagaggcagaataggatcctgtgaagacttctagggtcaggtctggaaatatcttttgctcacactccattggccagaacaagactgcctcagtgcagaggaagctgggaaatgtagtttagtagggtacccagaaggaaaagggaaacagtctctgccacactgaagcaacaccaaaatctgagggttggatgtaggaagaagcacctgcaaaagatagaaaagagcctttaagaggatcacctgaagccaggagtttgagaccagcctgggcagcatagcaagatcctatctgtacaaaaaataaaaataaaaaattagcctagggtggaggcatgcacatacagtcccagcaactcaggaggcttggggccaggagtttgaggctgcagtgagctttgattgggccactgcactccacttaagcctgagtgacagagcaaaaccctgtatccaaaaaaaaaaaaattaaccaggagaaaaatgacatttggagatcctgtctctaaagaaaaaaaaagctcactgcatagctcactgcagcctcagaaacaggcccaggactgaatcaaggccagcaaggtgctggggtgataagcgagcccgactccagcctggccaacacggtgaaaccccttctctactaaaaatacacaaattagctgggcatggtggcagacgcctgtggttccagctactcaggaggctgaggtaggaggatcacttgagcctggggcgtggaggttgtagtgggccaagattgtgccactgcactccagcctgggtgacagagcaagaccctgtctcaaaaaaaaaaaaaaaaaaaaaagtgagctggaggatgaggcctccctaaattttgtgccttgggtgtctcgatccgtcacgccagccccagtcccggcagtcaggtgcggcagagaaagcaaagggagaaggctgggaagatgcaagtgaatttagcgactagcagtccctgtgagcaactgtagcaagaagggtttccaatgaagaaaggaaggccctgggccaggcgcggtggctcatgcctgtaatcccagctctttgggaggcagaggcgggtggatcacctgaggtcgggagctcaagactagcctgaccaacatagagaaaccccgtctctactgaaaaaaaatacaaaattagccgggtgtggtggcgcatgcctgtaatcccagctattcgggaggctgaggcaggagaatcgcttgaccccgggaagcggaggttgcagtgagtcgagatcacgccattgcgctccagcctcggcaacaagagcgaaactccatcaaaaaaaaaaaaaaaaggaagaaagaaaggccctggcagttcttggacaggaacttgcctgaagtcccagtcccggtgactggtggtttccccactttctggttcagaagctgggctctaagctgtctgtgcccttaaagttccttggaaagagggaagggaagggaagtggatattaggtgagttcctactctgtttcatttgcagagttttctcattgattctcagttggacccatgaggtagatgttatgccattacattttttttttctttagagacagggtctctctctgtcactcaggctggactgcagtggcacgatcacggctcactgcagctttgaactcctgggctcaagtgatcctcccatctcagcctacaggtgtgcaccactgtacttagctaatttctttttcttttttctttttttgggagagatgggatctctgtatgtctctatgatgcccacactggtctcaaactcctggcctcaagcgattctcctgccttggcctcccaaagcacagggattacaggcatgagtcgctgtgcccagcctgttatgccgggtttttttgttttgttttgttttttgagacagagtctcgctctgtcgcccaggagtacagtggcatgatcttggctcactgcaagctccacctcccgggttcacaccattctcctgcctcagcctcccgagtagctgggactacaggcgcccaccaccacacccggctaattttttggttttttagtagagacggggtttcaccatgttagctgggatggtctcgatctcctgacctcgtgatctgcctgcctcagcctcccaaagtgctgggattacagtcgtgaaccactgcatccggcctgttatgccgttttttaaattaattaataaatttatttatttatcttgagacagagtctcactctgtcacccaggctggagtgcagtggcatgatctcgactcactgcaacctccacctccggggttcaagtgagtctcatgcctcagcctcctgagcagctgggattacaggcggccgccaccatgcccggctaatttttgtatttttagtagagatggggtttcgccatgttggccaggctggtctcaaactcctgacctcaggtgatcaacctgcctctgcctcccaaagtgctgggattacaggcgtgagctcctgtgcccggccctgttatgccattttaaagctaaggaaactgaggcacagaaaaaggtaaaaaggtacttgagatcaaaaaggatggagttaggatttgaacccaggtccagggcccatgattttcccagcacaccatccaaaatgcctgcctgccctcaccagggagcacatgcttacattcacagccttggaccctgggttagggccaggagggctgggtgttgggtgagaacagggcctcgggctccttcactggctggggcagggcttctgagttccccatcagagcccctcctctgactttcagggcctgctgaggaatctgcaggcctggcagaggacaggagggaggcttggggagcctgggaagggccggctgacagcttgatgggccctccctccctccacagtcccacccccagcctggggcctctgggagccttggtcctgagcagccaacacaccagcccagacagctgcaagtcaccatggacgctgaaggtaaagggacactctctctgccatgtccctgcacccatccccccactgcctacccctgcccccaccctggcttgtctcagccccttgttgcctcctctggagtcatctctcctctggtcccgccatcgactcccttacctaccccatgtccctgcagccttgctcaacccccagaggccccttctcactcttctttctcctgtgttgagtccccaaggagctctggggaaggaaggggcttaagccctagaaaagggcagggtggcctggaggaggtggcgtctcctgggggcagtgggggccggaagtgggaggctggttgggggagcagcatggacttctgctctcgctggtagctcgggagaagcagagacaaagtcctgtcccttctgcagctgggtgggggagggggcttgagtcccgtgattccctgcctggagggagctgtatgcaaactgttggggtgatcagtcccaacccccaaccatgaagtccggtggcaacaaaggaatgagaaaagacaagttaagatttaaagcagccccagggggccagttgctaaagtgaaggctgcagagccctggttgcctgataatttattgagtacaatcttttgatctaagaagcagatggtacggggtgaaacggtgaaggtgggggtgtgcgcgtcatttgaaagatgtatagccgtggtggtttatgtgaatttcctttaagctcaaagcatatgtctaactactaagataatcttttttttttttttttttgagacggagtctcgctttcccccaggctggagtgcagtggcgtgatctcggctcactgcaagctccgcctcccgggttcatgccattctcctgcctcagcctcccgagtagctgggactacaggcgcccgccgccacgcctggctaattttttgtatttttagtagagacggggtttcaccatgttagccaggatggtctcatttcccaacctcgtgatccgcccgtctctgcctcccaaagtgctgggattacaggtgttagccaccgtgcccggccaactaagataatctttaacttattgggctgcagctggtgggagtgggttttacaaggagccaggatgtctggtcacattccaacgcttcaaggaagtgtttcagcccagagcattctgtgtaaagccgcagagcaggtcatgttcactggcctggggacacaatggcaataaggaggtgattctcctcagaggccccctatggtgttccataggtgtcctacacaggggtggctgactaaactggcgccccgtaaacccttccaccagcacaaacccaggggtccatgctctacgctcagaaggctccaccagggatggggctgtgtgaccatgggtgggtcctggcttctcagagtcccgttttcttccatctgtaaaatgacaataatagttccctgctctggcccgccacggtggctcacgcctgtaatcccagcactttgggaggctgaggtgggtggagcacttgaggtcaggtgtttgagaccagcctggccaacatggtgaaaccccgtctctactaaaagtacaaaaattagccgagtgtggtggtgcgcacctgtaatcccagctacatgggaggctgaggcaggagaattgcttgaaccccagtggcggaggttgcagtgagctgagaccaggcctcagcactccagcctgggcgacagagcgagactccatctcaaaaaaaaaggaaaataaatagttccctgctcagaaggttgtggggaggacagaggatgggaggcacaggtgcttagaccctcctccatgtttgaggtgcctgctggccccatacacccggtccctctggctccactgtggaaccagctctcaggggtcccatgcaggatgccacgccaaacacctttcaatctccattgtgtctttctcttttgaaacaacgccgacctggatgtgaatcctgactgccactcagcagcagtggaaaccctggcaagttttgtaacctgtagaagcccgtttccacatctggacaatggagttggtggcactggtctcacggggttgtaatgaagattaaataccttagcagatgtcaaggggtctcgacctgattccttcagagccaggattctttactgagggatcagggatgggctctgggggagttcatgaaccccagaatttgcaggtgaaattgtgtgtctttgtgagaacacggttacgcatttttctgggaaggagatccataattttcatcagatccagattctttttttttttttttttttttgagacagagtctcgccctgttgtccaggctggagtgcagtggcatgatcttggctcgctgcaacctctgcctcccgggttcaagcgattctcctgcctcagcctcacgagtagctgggactacaggcataaaccaccatgcccggctaatttttgtatttttagtagagatggggtgtcaccatgttggccaggctagcagatccagattctttttttttttttttcgagatggagtctgactctgtcaccaggctggagtgcagtggcaggatctcggctcactgcaaccttcacctcccaggttcaagtgattatcttgcctcagcctcacgagtagctgggactacacgtgcttcaggcacttgctgccatgtccagctaattttgtagttttagtagagacagggtttcaccatgttggccaggatggtctcgatctcttgaccttgtgatctgcctcctcggcctcccaaagtgctgggattacaggtgtgagccaccgcacccggcctcttttgttttttagacggggtcttgttctgtcacccaggctggttggtgtgcagtaacataatcatagctcactgtttgtagcctccaacttctgggctcaagtggtcctcctgcctcagcctgtggagtagctgggactgcaggcgtgtgccaccacacctggctaattaaaataaattttttttttttttagagatgggttcttgctgtgttgcccaggctggtctcaaactcccagcctcaagcgatcctccaacctcagcctcccaaaagtgttgggattacaggcatgagccaccgtgcctggctcaaatcttttcatatgtgaacatctcagcatgttttctttctttcttttttgagatggagtttcgctcttgttgcccagactggagtataatggcgtgatcttggctcactgcaacctctgcctcccaggttcaagtgattctcctgcctcactctcccaagtagctggggatacaggtgcccaccaccatgcccagctaatttttttgcatttttttttttagtagagatgggttttgccgtgctggccaggctggtcttgaactcctcacctcaggtgatccacccaccttggcctcccaaagtgctgggattacaggcgcaagtcactgcgcccagcctcatcatgtttttttcttaaaagataaagacttttctttttactacaaccacaatactattgtcaaaactaaactttaaaaatttccttggtgttatcaaacattcaatgtccagattccagtggtttcataaatagcctaatttgcttttagtttgtttgaattaggatctaagtaaaatctacactttgtgattggttagtatgttttaagagtctttgaaactttatttttttgattaaaaaatgtttaatttagagataggggtctcactatattgcacaggctggtctcaaatgccccaaagtgctgggattacaggtatgagccaccacacctgactgattctttttttttttttttgagatggaatctcactctgttgcccaggctggagtgcagtggcgcaacctcggctcactgcaacctccgcctcccagattcaagcgattctctcaccccagtctcccgagtagctgggattacaggcgtgcaccaccacacatggataaattttgtatttttttagtagagacagcgcttcaccatgttgtccaggctggtctcgaactcctgacctaaggtgatcttaggcccaccttggcctcccaaagtgctgggattacaggtgtgaccaccacgcccagccaatatgtggtcttatgagagcattggttcttttttttttttccctgaggcagggtctcaccctgttgcctaggccagagtgcagtagctccatcatagctcactgcagcctccaactcctggactcaagggatcctcccacttcagccttctgaatagctaggactacaggcgtgtgtcaccatgcccagctaatttttaaaattgtttttgtagagatgggttctcactatgctgcccaggctggtctcaaactcctggcctcaagcgatccttctgcctcggcctcccaaagtgttgggattacaggcatgagccaccgcccctggccgagcattgattcttgatcctcatgtgcatctgagtcacagagcagggtgggggctggctcttccccaacctggatccctggaaactacccccagagattctggttcactgggttggaatgggcctgagcatctgaaagtttgaaaagctccctgtgattctggtgtgcagcccaggcagaggccccactgtgtccacttctcttgaaaggagtggttcacaccaacacccccacttccctacctcccgtgcgctcctcgagcatgacaatgtggcttctgcccccgacacatggcacaaaaaccgctctggcacaggcctcacagttgctaagtgcagagccccatcctcagtcttccttctatttacttctgctcacctcccaaaaccctcttctccttcccaggtacccactcctgatgatgcttctctttttgttggacatgccctgtgggttctttatcttattattttattttagagaccgtggcttgctctgtcacccaggctggagtgcagtggtgcaatcacaggtcactgcagcctccaactcctggactcaagccgcagcctcccgagtagctggcgagtagctgggactacaggcgtgcacccccatgcccagctaactttttctttttttcttttgttttttgagacggagttttgctcttgttgcccaggctggagagcaatggcactatctcggcttactgcaacctctgcctcccaggttcaagcgattctcctgcctcagcctcctgagtagctgggatcacaggcgcccaccaccacgcctggctaatttttgtatttttagtagagacggggttttgctatgttggccccggagttcaatttttgtatttttagtagagacggggtttcaccgttttcaccaggatggtcttgatctcctgacctcgtgatcctcccgcctcggcctcccaaagcgctgggattacaggcgtgagccaccgcgcctggccacggcagcatctcttctgaactccagagccattccctaccaccctctgggcaccaccatccacatctcctgctgccgcctcagccttaacctctgcaaaaccaaatccgttctttctctcgagctctgcagaagctaagctgtttcaccaggccacgattcaggaaacgctttgggattcagcttctgttcttgtgaaatgggaagaatccctgtggtgagctccagatgagagcacaaaggggaacaggggtgcccgcggctggcacgccatggctggcacgccatggcactcagtggggtcaccgccccctcctgctgtcccacctccaccctgcctgctcttctcctggaatgactccttctgccagctctcagctacccaggccagaggcccaaggctcccacatctctttagctactaattctggtagatccccttttggaaatagccctcaaatctaccccagagctactgtcaaagttcagggctccatctcttttggtttttttgaaaatattttttcaaattaattatttgttggccgggcgcagtggctcacacctgtaatcccagcactttggaaggccgaggcaggtggatcacctgaggtcaagagttcaagaaccagcctgaccaacatggtgaaaccccatctctacaaaaatacaaaaattagccagggatgatgctgcatgcctgtaatcccagctactcgggaggctgaggcgggagaaccacttgaacccgggaggcagaggttgcagtgagttgagatcacaccattgcactccagcccaggcgacagtgagactccgtctcaaacaaaaaaaaattatttgtggaggcagggtcccactatgttgcccaggcctcaagtggccctcctgccttggcctcccatagcactgggattacaggtgacagccaccgcgcccagcctactttttgtctggccaagactacctcagccttcttttgcctcccaatctgtctccagttggtggctgaagtgacccttctggagcaaaaccataatcatatcactccctcttttaaaattctgtgatgggtcaggcatggtggatcacacttgtaatcccagcactttgggaggccgaggtgggaggactgcttgagcccaggagttcaagaccagcctgggcaacatagcgagaccccccgtctctacttaaaaataataaaataaaatgaaaagaaaattttttttgagatggagtttcgctcttgttgcctaggctggaatacaatggtgggatctcagctcacggcaacctccacctcccgggttcaaccgattctcctgcctcagcctcctgagtagttgggattacaggcatgtgccaccatgcccggctaattttgtatttttagtagagacggggtttcaccatgttggtcaggctggactcgaactcctgacctcaggtgatcggcccacctcggcctcccaaagtgctggaattacaggtgtgagccactgtgtccggccaataaaatgaaattttatgatggcttctgcgatctggccaaattcctcagctaaatagtttagttctttctccctgtggcctctcctcccaccatgtcacctgtgaatcccacactgcccccaccccgacactgtctgcaggtgaacagatcagttttctcagccccaaatgtcagccccaccccacacctctgcctggcaaacatcactcaccggtcctcagagacacctagtcatttattccatgagtccaccacacttgagaaacgcttcttttcttcgcgagcacgcctaccctgtgctagacagtgttcctaagggctttcaaacataaagtcttttgttttttgtttttgagacgcagtcttgctctgtcgcccaggctggagtgcggtggcacaatcttggctcactgcaacctccgcctcccaagttcaagcaattctctgcctcagcctcccgagtagctgggattacaggcgctcggctttttatttttttaattttttttattttttgtatttttagtagagacggggtttcaccatcttggccaggctggtcttgaactcctgacttcaagtggtccacttgcctcggcctcccaaagttctgggattataggcgtgagccactgtgcccagcctccaactcctggccttgtcttcctcccaccctggcttcccagagtgctgggattaacagacatgagcctccacacctggcaacttctttccatttttcactgattctctgacacatcctcattgagcacctgcactgtgtggggtgttaataattgctaggcatggaggcaacagcgtgggcagctctttctcttacttgtcaggctttagcctatgctgttgcaggactgtgccttggcctggaagccccttcccttatcctcatccccaatctcccccttcagctcttgttcctcttgcaggtcttcccttaaacatcacttcctcagcaggggcctcacagacacgcccggaggttagatcctggtccctctgtgcttcctgttcttcccccatcatcacagtctacggctgtttcctctcgatgggcaaagactgtgtctggccattgagttttctgctatatccaagtgcttcgtatactgaaccatataaatgtgctgcttttattggtcaaaacggccaaatattggcaattttatattggttagcttcatagtatgtgagctaggatacttatcccatcagagaggttgcgtagcacagtgaatcagagcccaggctctggggccgcacacctgaggtccagccctggctctgccacttgtcactaagtgattgtggactggagacaaccctcaggggccttgggttcctaatctgtgacagggatgacaataatgacctcctcgtgctgttataaaatacagaaatgtactaaaatacaaaaattggccaggcatggtggcacatgcctgtaatcccagctactcaggaggctgaggcaggagaactcaggaggcagaggctgcagtgagtctacttttattgccaaagctcgggggtccatcccttttccattgcatgccactgcactccagcctgggcaacaaagtgagactgtctcagaaaaaagaaaaagaaaaaaatgtttaaaagccaggagtttgagaccctgtctctattaaaaaaaaaaaaaattaccttggcatggtggagcagctactcaggaggctgaggtgagaggaccacatgagcccgggagttcaaggctgcagtgagccatgattgcaccactgcattccactctgtctcaaaaagaaagaaagaaaaaagtcaagagaactggagctgaaaccatgaaaggtcagttttcagcaggagagtgatcaaagaaaaccagaactagacagtcgttaaaatagcaaaaacatattgcattccagactattgctgtaggggaagagtgaccttagatcagaactgggctgaactctacaccatgggggttatagccaacgagcagagttgggggcagtggatgggacattaccatgagaaagcactgggggttgggggtattctgacaagaccaacctaaagggattcttgctgagggcaggccaaggtggtcagacagcgcctgggggagagtggagaatgaggacccccatcagggatcgggggcaatcagatgtggaggatgagggactggctaagctgacttagcagtattcttgctaaaattggacgatgcagaggtgaacacggaagtccaaggcctaactggaaaagagctgagggaacctgagtgaggtttggctatagacagaacctctgagtgagcccatcaaagttactttatttatttgtttgtttattaatttatttaagacagagtctcactctgtcgcccaggctggagtacagtggtgctatctcggctcactgcaaactctgcctcctaggttcaagcaattctcgtgcctcagcctcccgaggagctgggattacaggcacatgccaccacacccagctaagttttgtgtttttagtagggacagggttttgccatgttggacaggctggtcttgaactcctgacctcaggctaattttttgtttgtttttattctctttttttttttttttgagactgagtttcgctcttgttggccaggctggagtgcaatggcgcgatattgactcactgcaacctctgcctcctgggttcaagcgattctcctgcctcagcctcccgagtagctgggactacaggcgcacaccaccatgcccggctaatttttgtatttttaggagagacggggtttcataatattggtcaggctggtctcaaactcctgatctcaggtgattcgcctgcctcagcctcccaaagtgctgggattacaggcgtgagccaccgcgcccagccttttgtttgtttttaaatttaactttttttttgagaccgaattgcactctgtcacccaggatggattgcaatggcgcaatctcagctcattgcaacctctgcctcctgggttcaagagattctcctgcctcagcctcccaagtagctgggattacaggcgcctgccaccacagctggttaatttttgtgtttttagtagagatgaggttttgccatgttggacaggctggtcttgaactcctgacctcaggtgatcaacccaccttggcctcccaaagtgctgggattacgggcatgagccaccatgcccggccttaacttttatcttaagttcaggggtacatgtgcaggtttattatataggtaaacttgtgtcatgggggttgtacacattatttagtcacccaggtattaagtttagtacccattagttatttttcctgatcctcttgagggaagagagagaccctctcatattgtttcatactcagaaaaggaaagagaagcgaaactaaaggcaggtagcctggtgcctaggaaccagaccggaaaccaaggaaccagacccgaaatcaggcctgggcgtgcctgacctaagcctggtagttaaaattcgacccctgacctagcaactgttgttatctatagattccagacattgtatggaaggacattgtgaaacctcccgttaggttctgtttcactctgaccaccggtgctcgcagcccctgtcacgtaccccctggcttgctcaatcacgaccctctcacgcggacccccttagagttgtgagccgttaaaaaggacagaagttgagcacctgaagagctcggattttaagacgctagcctgccaatgctcccagctgattaaagccactcccttcactatcttggtgtctgaggggttttgtccacagctcgtcttgctacacttgccctcctccaaacttccgccctccaataggctccagtatgtgttattcccctctatgtgtccatgtgttctcatcatttagctcccacttataagtgagaacacgcggtatttggttttctgttcctgcgtttgtttgctaaggataatggcctccagcgccatccatgtccctgcaaagaacgtaatctcattcttttttgtggctgcatagtattccacggtgtatgtgtaccacactttctttgtccagtctagcattgatgggcatttaggttgaatcatgtctttcctatggtgaatagtgctgtgatgtgtctttataacagaatggtttacattcctttgggtatatacccagtaatgggattgctgggtggaatggtatttctggtttttggtctttgagaaattgctgcactgtcctccacgatggtttaactaatttacactcccaccaacagtgtataagtgatcctttttctttgcaacctcgccagatctcggtggtcaactcctcccactccccaggcaatgctgatttgctctgtgcctatagttttgcctttcccaggatgctgcgggaatgggatcatacggccttttggatctggctccttttagttagactgatacatttgagacaggtccctattgttgtgtgtatcagtagttggtttcttctttttttgagatggattctcagtctgtggtccaggctggagtgcagcggcatgacctcagctcactgcaaactccgcctccctggttcaagtgattatcctgcctcagcctcccaagtagctgggattacaggcacatgccaccacgcccggctagtttttgtattttttcgtagagatgggatttcaccatgttggagaggctggtcttgaactcctgacctcgtgatctgcccaccttggcctcccaaagtgctggaattacggcgtgagccatggtgcccagcctgcatcacaggttgtttacccaatactcaccagttgcagaattcaaatccattttttaaaaaatcagcctgaaaaaaaaagaaaaaaatcagtctggccaggcacggtggctcacgcctgtaatcccagcactttgggaggccaaggcgggaggatcacctgaggtcaggagtttgagagcagcctggccaaaatggcaaaaccctgtctctactaaaaatacaaaaattagctgggcgtggtggcgggcacctgtaatcccagctacttgggaggctgaggcagaagaatccctggaacccgcgggacggaggttgcagtgaggtgacatcaggccacttcactccagcctgggcaaaagagtgaagctctgcatcaaaaaaaaaaaaaaaaaaaaaaaaaaaaaatcagggtgggcacagtggctcactcctgtaatcccaggactttgagaggctgaggtgcgaggattgcttaagcctgggagttcaagacgaggctggggaatatagtgagacccccatctctacaacaaaaaatatacaaaaattagccgggcatggttggtgtgcgcctgtagtcccagttccttgggaagctgaggcgagaggattgcttaagcctgggcagttgaggctgcagtgagccatgatcgtgccactgcactgcacctagtttgaatggagtgggagtgggggattaggctctcctccctgccgtttgctcccaggccttttccgtagctggatgtgaccaacagagacagtgcccagcctcagtatagctagctcttagtggagggacaggagccatctggggcagatgtgggagagaatgtggcgaaggagagccgggtgcagtcaaggaggcttgtggctcggaggggaggtggggtgagtgagtggagactcagcagcttggctttggggaagtagacaagagagggccctctttggagagcggagcaagccaggatgtctggccttcacttccacttggaacagaagtgtgctgtgtgcgcgtgcttgtgcgtgtgcgtgcacgtgtgtgcgcgctaaatcaaacaccctcgctggctctgtgttcccctcaaggggaagccaactccacggatggcgggggtccattaggctgcaggtcttctccctgccgatagatggcgctgttgcaccgcgcctgggtttgcctctgcccgcagccatgcagggcccatcacgggctatgcctaccgcgcgaggggccttcaccatgtccactatccttatttatttatttatttatttatttatttattttttaagtgtgggtactggccgggcgcggtggctcacgcctgtaatcccagcactttgggaggccgaggcgggcggatcacgaagtcaggagattgagaccatcccagctaacacggtgaaaccccgtctctactaaaaacacaaaaaaattagccaggcgtggtggtgggcgcctgtagtcccagctactcgggaggctggggcaggagaatggcgtgaacccgggaggcggagcttgccgtgagccgagatcgcgccactgcaacagaacgagactatctccaaaaaaaaaaaaaaagtgtgggtatatagtaggtgtatatatttatggggtgcacattgataaaggcatgcaatgcataataatcacatcatgggctagatgcggtggctgacgccgagatcgcgcctctgcagtcgccaggccactgcaggcgccacagtggcgacagagcgagactccgtctcaaaaaaacaaataaataaataaatcaggttaggccgggcgcagtggctcacgcctgtaatcccagcacttgggaggcggaggcgggcgaatcacgaggtcaggagttccagaccagcctggccaacatggtgaaaccccgtctatactaaaaatacaaaatttagccgggtatggtggcaggcgcctgtaaccccagccactcgggaggctgaggcaggcgaatcgcttgaatccggaaggcggaggttgaagcgagccgagatcactccattgcactccagcctgggcaacaagagtgagattctgtctcaaaaaaaaaaaaaaaaaattacatcatagagaatggggtgtccatcccctcaagcatttatcctttctgttacaatccaattgcattcttttagttatttcgaaatgtacagttattattgactgtagtcaccctgttgtgctagcaaatagtaggtcttattcattctttctattttttttgtacccattaaccttccccacctccccatcatccttttttttgttttgagacggagtcttgctctgtcacccaggctggagtgcagtggcacgatctcagctcacttcaacctctgcctcctgggttcaagcgattctcctgcttcagcctcccgagtggctaggattacaggcctgcgccactatacttggctcatttttttcggggttttgccatgttggccaggctggtcttgaactcctgacctcaggtgatccacctgcctcagcctcccaaagtgctgggattacaagcatgagccactgtacccagccccatcatcctcattttatttattttttatttttattactatttttttaggtggagtcttgctctgtcacccaggctggagtgcagtggcgtgacctcggctcactgcaacctctgcttcccgggttcaagcaattctcttgcctcagcctcccgagtagctgggattgcaggcgcctgccaccacgcccggctaatttttgtatttttagtagagacaggagggttttaccattttggctaggctggtctcaaactcctgacctcaggtgatcctcccgccttggcctcccaaagtgctgggattacaggcgtgagccaccgcgcctggccagactgattttttttttaagtgaatttgaaagctgcaactggtgagtattggataaacaaactgtgatgggattgcaggtgtccacccccaagcctggctaatttttgtatttttagtagagaccatgttggccaggctggccttgaacccctgacctcaagtgatctgcctgccccagcctcccaaagtgtttgggattacagtcgtgagccaccgcacccggtcagaagtttaatttttttttttgagacggagtcttactctgtcaccccggctggagtgcagtggcctgatctcggctcactgcaagctccacctcccaggttcacgccattctcctgcctcagcctctggagtcgctgggactacaggcgcccgccaccaagcctggctaattttttcgtatttttagtagagacggggtttcaccatattagccagaatggtctcgatctcctgacctcgtgatccgcccgcctcggcctctcaaagtactgggattacaggcgtgagccaccgcgcccggcccagaagtttaaatttaactaggtgcccagtgatctcatcaagcccacagcactccctcaccctcgcccccacaacctcccttccccccacgccccccttcctcaccgcagtcccccccctgggacccctagatcttgaggctgatgggccagttcccagtttcactggttgttaaatattttgacagtgacccctgacagcaggagaggcagccaaactcaacagctgttctctcttccccccaggcctggcgctgctgctgccgcccgtcaccctggcagccctggtggacagctggctccgagaggactgcccagggctcaactacgcagccttggtcagcggggcaggcccctcgcaggcggcgctgtgggccaaatcccctggggtactggcagggcagcctttcttcgatgccatatttacccaactcaactgccaagtctcctggttcctccccgagggatcgaagctggtgccggtggccagagtggccgaggtccggggccctgcccactgcctgctgctgggggaacgggtggccctcaacacgctggcccgctgcagtggcattgccagtgctgccgccgctgcagtggaggccgccaggggggccggctggactgggcacgtggcaggcacgaggaagaccacgccaggcttccggctggtggagaagtatgggctcctggtgggcggggccgcctcgcaccgctacgacctgggagggctggtgatggtgaaggataaccatgtggtggccgccggtggcgtggagaaggtgctggtcctgcctgtccctggtccaaccccaccctcagcacacccctcccctcccctcccctctccagagcctccagccatgaccgggtgaacagccatggcctggagtcagcaacacaagactcttcccacctcagctcctccatctgagctgggctcagttgagctcatccagctaagctaaaggggagctgggcctgcttttctttttctggagatggggcctcagtctctccagtagctggatatacaggcatgctccaccccactggctaatttttgctttttttttttttttttttttttgagatggagtctcactctttcacccaggctggagtgaagtgatgcaatctcggctcactggaacctctgcctcctgggttcaagcaattctcctgcctccgcctcccgagtagctgggattacaggcgccagccaccatgcccggctaatttttgtattttttagtagagacagggattcaccatgttggccagactggtctcaaactcctgacctcaggtgatccacccacctcggcctcccaaagtgctgggattacaggagtgagccactgcacccagctgccttttttttttttttttttttttttgagatggggtctcactatgttgcccaggctggtctcaaacttctggactcaagtgatcctcccaccttggccacccaaagtgctgggattataggcataagccaccatgcctggttttggaattggttctttatctttgttctgctgctgcgtggcgtgatgttcaagagcaaaggacaacacaggggaagccagtgtcactggcaccacagccttgagcccatctctctagccctctgcaccttatttcccatctgtgaaatgcccttaaacaccccttctaattttaatattctgagtcaaattgagctcaggtccaaatgccaaatattgctgatattcatccactttttgacccacaaaagtggtcattttaacctacaataaaacatcctggctcagtggctcatacctgtaatcccagcactttgggaggcccagttggggggattacttaagtccaggagtctgagaccagcctgggccatatagcaagattctgtctctacaaaaaattaaaaaattagccatgcttgtgggcaagcccctgtagtcccagccacttgggaggctgaggtgggaggatcacttgatcccaggaggtggaggctgcagtgaactatgactgcactgaactccagcctgggcgacagagcgggaccctgactcaaaaacaaaacagtggccaggtgcggtggctcacgcctgtaatcccagcactttgggaggctgagatgggtggatcacgaggtcatgagttagagaccatcctggccaccatggtgaaacgtcgtctctattaaaaatacaaaaattagctgggcatggtggcacgcacctgtagtcccagctactcgggagactgaggtgggagaatcacttgatcccaggaggtagaggctgcagtgagctatcattgcaccactgcactccagcctgggcgacaggttgagaccctgtctcaaaaacaaaacaaagcaaaaacaaccccaaagtctggtttccttattaaccccaagttcatggtccacccgaagcttttcaaatgtcagtcccggctccccgcgccccagctgcagtgctgggccctatcgtcaccctcgccctcccggctccctgcgccccagtgccaggtgctgggcccagtcctcacccttgtcctcccggctgcccagcaggcggtgcgggcggccagacaggcggctgacttcactctgaaggtggaagtggaatgcagcagcctgcaggaggccgtgcaggcagctgaggctggtgccgaccttgtcctgctggacaacttcaagccagaggtaaggtgggctctgcctccggggagggatctgtggtgggctcttacctccccttggcttgtgtcccgcaggagctgcaccccacggccaccgtgctgaaggcccagttcccgagtgtggctgtggaagccagtgggggcatcaccctggacaacctcccccagttctgcgggccgcacatagacgtcatctccatggggatgctgacccaggcggccccagcccttgatttctccctcaagctgtttgccaaagaggtggctccagtgcccaaaatccactagtcctaaaccggaagaggatgacaccggccatgggttaacgtggctcctcaggaccctctgggtcacacatctttagggtcagtggccaatggggcacatttggcactagcttgagcccaactctggctctgccacctgctgctcctgtgacctgtcagggctgacttcacctctgctcatctcagtttcctaatctgtaaaatgggtctaataaaggatcaaccacatggggttctgcggtgataatgagcacatagtgaggggtcagcaaatgtcagaagttacctgggacagccgggcacgatggctcacacctgtaatcccagcactttgggaggctgaggcgggaagatcacttgagttcaggagtttgagaccagcctggccaacatggtgaaaccccatctctaccaaaaatagaagaattagctgggtgtggtggcacgcgcctgtaatcccagctacttaggaggctgaggcaggagaatcgcttgaacccaggaagtggaggttgcagtgagctgatggtgccactgcactccagcctgggtgatagagcgagactctgtctccaaagaagaaacaaaggaaagaaagagagaaagagagagggagggagggagggagggaaaggaaggatggaaagaaaggaagaaaggcaggcaaaagccccagacaggccaaaaccttcatccttcatgcacccaacctgtaccaaacaccagcatggcctggctgtgagtgcacagcagatggaggtttgctgggcagagacactgggctggcctagacactgcctttggtgataccctaaaccaaaggggccagtcccacagtaagaaggagaccactactactcctgctgccctcctccccccaccttgcctagtttacaagacaggaggaaagagagaaagcaaaaagttagaaaacaaaacaaaacagaagtaagataaatagccagaagaccttggcgacaccacccggccctggtagttaaaaaaaagtaacaataataataatatcaacccctgacctaaactacttgtgttatctgtaaattccagacattgtatgaaaaagcattgcaaaactttctgctctgttagctgatgcgtgtagcccccagtcacgttccccgcttgcttgagatatcatgaccctttcacgtggaccccttagagttgtaagcctttaaaaaggccaagaatttctttttcagggatctcagctattaagatgcaagtctgccaatgctcctggccaaataaacctcttccttctttaatccggtgcctgaggagttttgtctgtggctcgtcctgctacaagaggacacagcccagaggtgccacctgcagctgccctgtcccctctaatcccagctccaccctgcctgctcccgtccttcctccagggggaacatggacacgctcagatgaaccccagcttcttatgcctgaactggggaaactgaagccccatgggaccaggggttccactgggcatcaagggaggaaagttgagccccggggtgatctgggaactgggatctgggatctgggcaggcattggggcctgacagagcagaagtgaggagagggtaccaggagctgcaaactcggtgcctccaggacctattcggataaaataaatgggtggaactggaataagacaaagtgggggtgcgctgtggccaactggaaaatgctcgttgcagccacagcgttccattaaaaaagcgaaaggaacctgcctgcctgagtcttaagctccccctaaacccagaaatgggttagccctccagtatcctccagctctgagagctggggcgggcactccattactgggggaacaggaaatggatcctgggcactctagggcaacacacgccctccttgcagggaaatggatttccaggcaggggagatgcatgggcagaggtggcttggattgtttgctgtaagatttgaagctgtgatcaggaggtggctaggagatgggctgggtccagaccacaaaatggtagatcggaggatttggactctgtctcatgagtgagctggaaatcaagctggaaaatcagataagcttattcgcagcttcaatccagtccgttgcagaaggatgcatttgagggggctagagcagctgcagggaggccaggaggagctgtggaagaggacttgagtgtgggtcatggccatggggtttggagagaagtgatacagtgtcttcagagcttcagaaggcagagggagttcgatggctcaaggcagttggaagagttgggtgtgactgagggggtggggaaatggggcatgcgtggcaggcaaggactcttatgcatcacctcccagtcccttgtccatctggctacacttcctctttgcctggccagcctaggaccaagctgggatcatttccccaggatgccccacagacaatggcaaatgtgcccatcatagcagtttgtttaatgaaaatgatatgctgttgtgagtacgggatgtgccagcaatgctggctactgcatgagacgggagctagcagggagcaccttcatccagggtgtgcaggtccccttccctcagttaatgctcgtgggggcgggcgttagcctctccacttaccgaagaggagactgaggctttataaagttaagagagctgcttagggtcactcatcaataaagtggtggaggccagtcatggtggctcacacctgtaatctcagcactttgggaggctgaggcaggaggatcacttgagcccaggagttcaagaccagcctgggcaacatagtgagactcaatttctatttttaaaaaattatccagctgtggtggtgcacacctgtagtcccagctactcaggagactggggtgagaggatcgcttaagcctgggcagttgaggctgcagtgagctgtgactgcaccactgcactccagcctgggtgacagaggccctgtctcaaacaaaaataaataaataaataaatatataaagtggtggagcagtttgaattgtgtcattcactcattcaatatttaactgagcatctactgtgtgccaggcactattctagacaatgaacatacaacgagtaaacagataaaaatctctgtcctcagggagtctgtatgttggggttggggtgggggcggggaagaatagacaatgaaaaaatacttaaggaaaatatgtagacaccaattgtcctgatggccacccctgatggccaccagagggcactgcaaccacgcggccctccgttcgtctctaattccagctccctttccggattccgaaggcaatagccaaggaggctatgaatacgcagcatagcatctgctcaagaatcaacgcgaggaggcattggcagcagttttttctccacccacttttccagcctcatcccctcatcagacccccatccaactgcccagggtacccctgtgacttttcaaagccccgtgtactccagattcaccagctactcacattcactcccagccacccatcccctcccaaatactgtctgggttacccaccaaccccatccatccgctcacctgatgcctgtcctcctcctcacccacccacccgcgcccctcgccccttccacctgctgtcctgcccaccggaaactggccaaattgtcccatagatttttttttttttttttttttttttggataaacacagaaattgacattcctggtcttaaagcttgaaacttaaatttgccttatctgagttccttccccaggaaactgaccctcaggcctcccagatagcatcaaggaactgaaactccttttctttacccccctctaattcctgttttcccacccacagctacatttgctccccactatataaacccccaattggagtttgttggagagatggatttgagacttatctcctgtctccttggcagatgtcatctgaataaagccttctttcctggcgatactcattgtcccgggatcccagatcagctttctgtgcagtaagcaatgggacctagactgaatccctggcgtttcggtaatacacccatccatcctgtccacccccacccatcctgtccacccccatctatcctgtccacccccgacccatcctgtccacccccgacccatcctatccacccccttgtgcttccatccactcatcactcttcccacccctccgcccacccaccatccgatgctacagaagcccagaactggggcactcaatctagaggtcaaagatggcaagaggtcaaaccagattgacagtgagtcacctcagtggatatgagttttagtgtgctgaggccgtgaaaggtaaaagcatttaaaaacagcaaggccaggcacggtggctcacgcctgtaatcccagcactctgggaggccaaggcaggtggatcacctgaggtcaggagttcaaagctagcctgaccaacatggggaaatcccttctctactaaaaatacaaacttagctgggcgtggtggcatgtgcctgtagtaccagctactgctacttgggaggctgaggcaggagaatcgctgaacccgggaggcggaggtttccatgagccgagatcacaccactgcactccaccccggggaacaagatcgaaactctgtctcaaaaaacaaaaacaaaaaacccacaaaaattagccaggcgtagtggcgggtgcctgtaacccagctacgcaggaagctgaggcacaagaatcacttgaacctcaaaggcagaggttgcagtgagccgagatcatgccactgcactccagcctgggcgacagagtgagactctgtcccaaaaaaaacccagagcaaacaaacaaaaaacacaacggcgagacattcttagcaaaccaactatctgcaaacaattcaacgtcggatctttaaaaaaatcccgctgtggcattatgctgcggacacatacattaatttatggctagcccttcaagacaaccaggtgggtaaaattatgtaaatgttcaccgcctctatactttgttccaatgacttcctgagtaattgattgttttgccaattactcagcaacatttaagacctgcttccggaggccctaagtagctcagcattctaagaccgaagtactgaagaaaatctgcctgtgtggctgtgaataacatctccatccgtcactgtgcacatcagatttaggccagataacgcaggctttatttatttcaggtacgccttgcgcttcagatcatgggactctagtatagcacccccagaaaattatcaagggcaaaaaaatcataatacatacctctagttcagtgggtccttggataacctctttcctctctcctagttcttcagctaaaagattcaggagccttagcaacaagaaggagctatcccacaagttgcattattctagatattcggacacttttttttttttttaagcaggagtcttgctatgttgcacaggctggtcctgaactcctgtccttaagtgattctcttgccttggccttccaagtaactgggattacagcggtgagccaccgtgccagggttttggatgctttttttttttttttttgagacagagtctctcttgtcgccctggctggagtgcaatggtgtgatcttggctcactgcaacctctgcctcccgggttcaaacaattcttctcccttggcctcccaagtagctgggattacaggtgcgtgccactacactcagctaatttttgtatttctagtagagatggggttttaccatgttggccaggctggtctcgtactcctgatctcaggtgatccgcccaccacagcctcccaaagtactggggttacaagcgtgagccatcgcgcctggccggatactttttaaccaaaggaaaaagcaagcatctttattggaataatatatcaatatatgcaggtaatcagacaataccagtcagacaacactgacttctttttttttttttttgagaaaggaaggaaggaaggcagaaaggaaggaaggaaggagggaaggccggaggtggtggctcatacttataatcccagcactttttgaagcccagaagggagatcacttgaggccaggagtttgagaccagcctgggcaatatagagagaccccatcttgacaaaaaatttaaaaattagccaggcatgataatttgcacctgtagttccagctacccaggaggctgaggcaggagaattgctggagcccaggagtttgaggctgcaaccagccgtgactgcaccactgcactccagcctgggcgacagagagataccctgtctcgaaaataataaataaaggccgagtgtggtggctcacacctgtcatcccagcactttgggaggccgaggcaggcagatcacctgaagtcaggacttcaagaccagcctggccataatggtgaaaccccgtctctactaaaaatacaaaaattagccaggcatgatggcaggcgcctgtaatcccagctacttgggaggccaagacaggagaatcgcttgaacccgggaggcggaggttgcagtgagccaaggtcgtgccattgcactccagcctggagaacaacagcgagacttcgtctcaaaataataataaataaataaataaataaatatgtaaaaagtcccttaactgaggccaggcgcagtggctcatgcctgtaatcccaacacttcgggaagccaaggagggtggatcacctgaggtcaggagttcaagaccagcctgaccaacatggagaaaccccatctctactaaaaatacaaaattagctgggtgtggtggcgcatgcctgtaatcccagctactcaggaggctgagagaggagaatcgcttgaaccctggaggtggaggttgctgtgagccaagatcacaccattgcactccagcctgggcaacaagagcaaaacttcatctcaaaaaagccccttaactataatctaagaaacaaaaaatatttaatttttattttctgcatgatctgcttagttttcttaataagctgtgaaccagaaagggaatttgctgcggtttggcagccttttaggtggaggattatagtgaatacatttttagattattggtatagtaacttccccaaaggatgtaagattttgaggactaaaccaagtcctgcactttccattccaacctaattaattccagtgaatgaaacattcattggggaaagcacagaagatgcagaagagctgcttacatgacctgagtcaacaattcagtgaccctctgcgtataataatcaaaatagggccaggcgcagtggctcacacctgtaatcccagcactttgggaggccgaggagggcagatcacctgaggtcaggaatttgagaccagcctggtgaaaatggtgaaaccccgtttctactaaaaatacaaacaattagctaggcgtagtggcgcacacctgtaatcccggctactcgagaggctgaggcaggagaatcgcttgaacccaggaggcagaggtcgcagtgagtcgagatcgcgccattgcactccagcttgggcaccaagagtgaaactcggtctcaaaaaaataaataaataaaaataaaaatagaacaataaagtccattcataaattttctagcatagttaacttatccacctcctcttgcttttcgttaattaatttagttatcagagtacaaaatgaaaaagtaaaaaatatccattcactctcattcccatgaggtaaccacgtttaaggagctctgtgtttttagtcctcctggcatctacacttgagtggaaaagatgatcatttgtggttttaagcactattgactccctgatgtgaagaacaaagaatgtatctcactcattctttttttcttctttttttttgtgctgtttttattggtagtcttcctactagttatcatcataactttaaatgatatatttaatccccttttcttgaagcattgtttttatttttatttttttacttgtatttatttatttattgagacagagtctcactgtgtcacccaggctggagggcagaggtgtgatcttggctcactgcaacctccgcctcctgggttcaggcagttctcccccttcagcctcccgagtagctgggattacaggcacccgccaccatgcccaactaatttttgtatttttagtagaggtggggtttcatcatgtcggccaggctagtttcaaactcctgatctcaaatgatccacccaccttggccttccaaagtgctgggactggccggggatgatggctcacgcctgtaatcccagcactttgggaggctgaggcgggtggaaatcacaaggtcaggagatccagaccatcctggctaacacggtgaaaccccttctctactaaaaatacaaaaaattagccaggcgtggtggtgcatgcctgtaatcccaggtacttgggaggctgatgcaggagaatcgcttgaacctggaaggcggaggttgcagtgagccgagatggtgccactgtactccagcctggacgacagagtgagactccatctcaaaaaaaaaaaaagcaaaaaactccacaaagtgctgggattacaggcgtgagccactgcgcctggcctgaagcatcgtttttaaaattcagatataatttacatcgcatatacttcactgctttaaagggttcaggctgggcacagtggttgacacttgtaatcccagccctttgagaggctgaggtgggggggatcactcaaggccaggaatttttgagaccagcctgggcaacatagtgagactcgctctctaccaaaaaatttaaaaatgagctgggcaagatggcacacacctgtggttccagctacttgggacgctgaggtaagaggattgcttgaggccagaagctcgaggcagcagcgagctgtgattgcaccactgcactccaacctgggaaacagagtaagaccccttctttttttttttttagatggagtctcgctctgtcgcccaggctggagtgcaatggcgcagtctaggctcactgcaacctccacctcccaggttcaagcgattctcctgcctcagcctcctgagtagctgggactataggcgcccaccaccacgcccagctaattttttgtattttcagtagagacggggtttcaccacattggccaggctggtctcgaactgctgacctcatgatctgcctgcctcagcctcccaaagtgttgggattacaggcatgagccaccactcctggccaaaaccccttcttaaaaaaaaaaaaaaaaaaaaaaaaaaagaacatccttttttttttttttttttttgagacagagtttcgctctcttgcccaggctggagtgcagtggcgcaatctcggctcacctcctgggttcacgccattctcctgcctccatctcccgagtagctgggactacaggcacctgccaccacgcctggctaattttttttgtatttttagtagagatggggtttcaccgtgttagccaggatggtgtcgatctcctgacctcgtgatccgcacgcctcggcctcccaaagtgctggaattacaggcgtaagccaccgttcccggccaaaagaacatcttaataatcccagaaagattgggcgcagtggctcatgcctgtaatcccaacactttgggaggttgaggcaggtggaccacgaggtcaggtgttcgagactagcctgaccaacacggtaaaaccccatctctactgaaaacacaaaaattagccaggcatggtgatgcatgcctgtaattccagctactcaggaggctgaggcaggagaattgcttgaacctgggaggcggaggttacagtgagctgagactgtgccattgcactccagccagggtgacagagtgagactctgtctcaaaataaataaataaataaataaataaataaataaataaaataactccagaaagaaactcccttcttgtgatatcaagtacatctccctcctctcagccaatggcaaccattattctactttctgtcttgatggattttatctacatagaattgagggaagagagaacttctcatattgttttatattgttttatactcagtacctgttttaagaaaaaacaacaagaaagtaaaatcaaagacaggcagcccggcgccaggcccgaaaccaggcctgggcctgcctggcctaaacccagtagttaaaaatcaactcataacttagaaaccaatgttattcatagattgcagacactgtatagaagaacactgtgaaactccctgccctgttctgtttctctctgaccaccggtgcatgcagcccctgccacataccgcctgcttgctcaaatcaatcacgaccctttcatgtgaaatctttagtgttgtgagcccttaaaagggacagaaattgtgcattctgggagctcggattttaaggcagttgcttgctgatgctcccagctgaataaagcctttccttctacaacttggtgtctgagaggttttgtctgcggctcgttctgctacagaagcatacaacacatggccttttgtgcctggcttcttccattcagcatgtttctgagggtcatccatgttgtctgtacttcattccttttaatggtttccattgcatggatatactacattttctttacccatgcttcagttgatggacatgtgggttgtttctacgttttggctattatgaattatgctgctatgaaaattcatgtactggttttggtgtgggcacacgttttcaatttctcttgggtgtatacctaggaatagaattagaaaatcatgttggctgggtgcggtggctcacgcccgtaatcccagcactttgggaggccaaggcgggcggatcacgaggtcaggagatagagaccatcctggctaacacggtgaaaccccgtctctactaaaaatacaaaaaattagccaggcgtggtggtaggcgcctgtagtcccagctactcgggagactgaggcaggagaatggagtgaacccgggaggcggagcttgcagtgagcagagattgcgccactgcactccagcctgggcaacagagcgagactccgtctcaaaaaaaaaagtcatgttttactttttgtggaactgccacactggttttcaaagctgctgcttgtacattccactagcaatgcacaagggttcctatgtctccacatccttgtcaacacttgttattgtccatctttttaattatagccatcctagtgagtgtgatgcagtacctaattgtggttttgatctgtattttcctaatgattgatgatgttgaacatcttttcatgtacttatagaagttattaaaaaattactttaggcagatggagaggaaaaggggtccttggaaagttgtttcttttaaagcaactccagaaacgtttctggtttaccaggaaagccctggctcttagagcccagccagcaacatttgatatgcaaatgcagaccattagaaactgggtccacccaaacatggcgattcccaccgttgtcctcttgcccttgcccccacatgtgcctggcaaatggctacccctacatatcccccacctgtgtaaaacatcatggtgccctgcatttgcatcttaaaaggctagggtgagagggccagttttttcgtgggctatatgaatgacatgcctggttaaaccaatcccctaagccctatgcaaattagacaacacctcctccagcctcctcatatacccggttggtatgccccgcatttgtggtctcctctcttggctttggagcccccctccctctgtctctgtacgggggtgccttcttcttttcttcttctcccttctttcttgcctattaaactctccacttcttaataccactacacgtgtatctgtgtcattttatccaatttgcatgagacaagagccctggtgcccctccactcatcagagccgtatcattttggtgcatgggccaggaaaatccaaagtacagccttcgttggagtggtgagtatgggagcaatcctaaaatctgttctatcattacgaggcgctcttagcctctatattaaaataaatcaaacgggcgtccgtcagcctaatacataggcttagcattggctgccgtactaaagactcggatgtgaggcttgctggggagaacttggagaatcccccattacccacaggtactgggaattttggccatgtttgaactagcttctttttgttagggataacgctcaaaatcctaaggaaattgaacactcgaacaaaggattcttagcaaagcaattttacttctgcacagagggttgcctccttggccagttgccatgagagcacacctgaacaaaggggcatgagagcctttatttgcgatggaagtcctgcccctgtaccctttcctcattggctggggttgggtcatacaatctaaactaatcccggttggctaaacatttcattttttaagatagggtgggcacgtaaaaacaagtggagaggaaggggaaggggtgtctgtaatgagctagaaagttagtcatttttccaaataaggaaaggaatgtgagctggtactgataacgcttggtactgtggtgtgcctgggcatctaacaaaggcaaaatggaaaaggagaaagaaggagaaaaaagggggggggtacaatgaattaaagaatgaaagattgatgagattatttgaagagaaacctcatcatattccacattttcacagggagaccttgccatcatgcgaggctgggaaaacttctgaggtaactgagaatttctggtcagggcacactctggcatgattcaagggcctctggaccggacgcagcctccgacagccgggtgttggcagagaatcctcaactatcctgtggccaaattttctttctgtctctatccatggtctcttaccctctctgtgtgtctaatgtgcagggatctttacagttcagggaaacaggtctgctagaagagatggtgaatcacggcagccagtaactcaataaacgtttctctatggtttctctggtgagcacgtggtatttctaagccacctagtggcaataaaaatcctcttcatgagacacattgctggttctctacggtacattgcagcttcgcaatttttctattttgcgcttttttactgctatttctgtgaacgggaaggctctgcttttaacaggagtcaaatgtcttctgcagccagattttagtcctaatattgtcccatcagtagaaattggccatttgcttcctacgttcttttaaggcacctattctgtctccagttaagatagtacttaattagtagggaaattttaagtctggaagttaaccggaaccattttcctatgggtaaatgttttatcataggccataatagcaggatttagagttcaatctagcatgccccctgccttaaaggggtcttgcccaattacatgatttttcttgaaatccatttttttaggaaggcacaaaggccacacaagtctggaaggtcaaagagaaataaaaggcagaggactaaggctgcttggggaaagcgtgactaaggctcaaaagttgagttcctctgatgtcatggcttggagggtcacgcctgcagtcacaggtcactggtggcccatttaaataggtgctgggaatccagaaaccacggagagaagatagttgggggaactccccctactgcttttgtctccaacctggatcacataccaaaaggaaggagactaaaagaacgcttttattctcacttctctttctagatgggaattagatcatgtataacatgcactgccctcgagtgtattttaaagcactgggactccttcaactctgaaactttgaagaaaaagtggcttattttcttttacacaagggcatggcgtatttgtttttgttttttttttgttttttttgtttttttttttttgagacggagtcctgctccgtcactcaggctggagtgcagtggctcgatttcggctcactgcaagctccacctcccgggttcacaccattctcatgcctcagcctcccgagtagctgggactacaggcgcccgccaccacgcccggctaactttttttgtatatttaatagagacggggtttcactgtgttagccgggatggtctcaatctcctgacctcgtgatccacccatctaggcctcccaaagtgctgggattacaggcctgagccactgcccccggctgggcgtggcctttttactaaacttctgcaagcgttgcaaaatcaacctagctcttttagcaatcacatcaggcaggcccaaagagaatgattacccaaaattagagaagccagttctaggggaaccacctgaggattcctttatttggggccccttcaagttcctttctcattatttaggaccttaggcaagtaaagggagacttaggccaattttctttctttctttatttttttttgaaacatagttttgctcttgttgcccaggctagagtgcaatggcgtgatcttgactcactgcaacctccacctcccgggttcaagcaattctcctgcctcagtctcccaagtagctaggattcacaggcgtgcatcaccatgcccagctaattttatgtttgtttgtttttttagtagagacagtttcaccatgttggtttggctggtcttgaactcctgacctcagatgatccacccgcctcagcctcccaaagtgctgggattacaggcgtgagccactgcgcctgtccaatcttctaatgaccctgataggtatacagaagttttccacaatttaactcaggtatttaacctctcatggaggaatgttatgctgctcttaagccaaaccctaactgcagttaaaacaggcagctctgcaagcagaagaaaattttggagataagcaataggtctcctatagtaggccaaaagggaaaagaaaaaatagggaaggcaaagaaataggggaaacaatatttccaataggaaaagaggcaatacctcttggcaaccctatttgtcactcctttctatggtgtttttccttctttcacggtttaaaatggcttctatctcttttataatgttcttccaacctgggaaaagttatttttccaaacgttaaaatgcttggcttagagttgagctagggggaagggaacacagaagcctggtatgctggcaaaagggtaaacatttcttaccagatgggcttttggcttctccctgtgcaaaccggtaaaagggataataaggatcattgtttatattctctgtaaatttctaattcataaaaaaggatttgtgaggttggtcttaagctgtaaacaatctggtgtgctttgcatgtctttccctaagaaagggtatcttaggttaggatgcaggcctaggaccccataagcctggtgtttgagcgagcccaacaaaatcgtcactaacaaaattggctataagccttcatcttgtttcatgtccttggaaacatgacctgtaaccacgtggcaatactttgtttgagtctccaccatttcataatggtggctgtcttctggtgctaagtcagtttctgggtgagggccacaaaatcagattaagtcggtttgtcaatctgggtggtgccagctgatccatcaagggcagggtttacaaaatatcttaaacactcattttaagagtagtttagggagtgtcaaaatcttgtagcctccagatgcatagctcctaagccatagtttccaatatatatatataattttatattatatatatacataattttatattatatatattaatatataatatatataattatatatgttaatatatttaatatataattatataaaatatataatatataattatatatgttaatatatttaatatataattatataaaatatattaatatatataattatatagttaatatatttaatatataattatataaaatatataattatatataattatataaaatatataaatatatataattatataaaatatataattatatataattatataaaatatataattatatataattatataaaatatataattatatataattatataaaatatataaatatatataattatataaaatatataaatatataattatataaaatatataaatatataattatataaaatatataaatatataattatataaaatatataaatatataattatataaaatatataaatatatataattatatataattatataaaatatataaatatatataattatataaaatatataaatatatatatatatatattttttttttgagatggagtcttgcactgttgcccagggtggagtgcagtggcgcaatctcagcttgctgcaacctccacctcccaggttcaagtgattctctttgcctcagcctcacaagtagctgggattacaggcgtgtaccactacacctggctaacttttgtattttcagtaaagacagggtttcactatgttgaccaggctggtttcgaactcctgacctcgtgattcgcccaccttggcctcccaaagtgctgggattacaggcgtgagccaccacgcccagcctggtttttaatcttatggctagtttcttggtctggtccccagacaagagggaagtatatcttaagaaggggctgatatcatctttgttttaaactatctatagtttaataactataaactatctatagtttaataactataaactatagcttaataactataaactatagtttaataactataaactatagtttaataactataaactagtttaataactataaactatagtttaataactataaactatctatagtttaataactataaactatctatagtttaataactataaactatctatagtttaataactataaactatagtttaataactgtagttttaaactatctatagtttaataactataaactgtctatagtttaataactgtaaactcgcccctcccaaagttggtccagcctacacccagggatgggcaaggacagcttgggggctggaaacaaaatggagttgtttgggtcggatctcttctctttcactgtctcagtctcagttttgcaatgacagtttcaaaagctgcctattactcctttgaaaataccttgtacacttgtggataagtcataacctaattaaggctcattgggttcacctgtgaggttactttttgtaaaactcaaaagccaaaaatcttaactgcttggcatggctaaagtcaagtaacaagggattttgaaggcttttcttagagcactcagcttaattaaaagtggatattcaagttataggtatacttaaaaggcctttatgtttttctcttcttgaatcttgttttctggaaaaaggctcttctcagtcaactgaattatttttctccatttttgtcttaaccactcttaatgcatgcatgagagtccctaagacaacttctgacagcatggaactccttgggaaaaacagaggaggtgccacaaaccctgttttggaaaaaaaacctgttttcctcatgaaacccccaaaattaaaagctgatagttccctctcaaaaccaaaggctctgttctgttatgtattgtgttatctaccgttttgagttttgggggtatcaaattacttcacattataaaagagctttgatgtgtaataactaggtagaaaatacactgtaaaggatgcctaatagtagttataaatcaaaaaagcatgctcttgggcacctaaaaaacatccccaccccccacaaagagatgagactaccatgcagaatgggctaattgccaaaataagccaattggctttgggttgccttgcaatgaaatgcatggtagaaacactacactgtcttctctcatagtatctatatggtcttttcataaattgagcattgaaataaaagcatagcaaggagttcctaaaacactaatctgtcctttggtaaaaaggttataaaagatttgtaaagatttaactgtaactgtcctggaaattttgtcattcgcaaacaattgttgtcttgcttcgttccttctcagaaaatggtttataatcaagctatattaaggactttaacaggtgttctcaaatgcaggtttttaatagctttgaagattgtaacattggaataaaaaagtacaggactcataaagaatggacatattcacaaatatcaagcaaaacaaaagttaactaaatggactgcactcaaaaagttaaagcagcttttttttttttttttgtgatagagtctcactctgtcacccaggctggagtgcaatggtgcaatcttggctcactgcaacctccgcctccctggttcaagggattctcctgcctcagcctgggattacaggcgcccaccactgcgcttgacaaatttttgtatttttagtagagacagggtctcaaactcctgacctcatgatccacacgcctcagcctcccaaagtgctgggattacaggtgtgagctgccgcacctggccaaagcaacctttttaacttttgcttggaatattgcaaatacgcatgagagtccctaagataacttaaggatccttgttttgtctttcagagtcaagaaaacttattttgaactatttacagcctttaataattaagtaaggtgccgggcaccgtggctcatgcctgcaaacccagtactttaggaggctaaggagggtggatcacctgaggttgggagtttaagaccagcctgaccaacttggagaaaccccatctctactaaaaatacaaaattagctgggtgtggtggtgcatgcctgtaatcccagatactcgggaagctaaggcaggagaattgcttgaacccaggaggtggaggttgcagagccaagatcacaccattgcactccagcctggcaacaagagcgaaactctgtctcaaaataaaataaaataaataattgcgtaaggtatatgcctgtgaacaaaatttggagcatgtttgtttttctctgcctggttcctctagaacgtggagactatctgtgagtactcttaacttatggcagtaaggttgtttgcatcagtgcaataagagtcaattttctggccgggtgccgtggctcacgcctgtaatcctagcactttgggaggccgaggtgggcagatcacaaggtcaggagatcgagaccatcctggttaacacggtgaaaccccgtctctactaaaaatacaaaaaaattagccaggtgtggtggcggtgcctgtagtcccagctactcaggaggctgaggcaggagaatggcgtgaacccgggaggcggagcttgcagtgagccgagatcgtgccactgcactccagcctaggcaacagagcaagactccgtctcaaaaaaaaaaaaaaaagagtcaattttctttgtcaacaggacacagttggaaaaactggttattttaccaaggtttcactgaaagggtgtgtttccctttaaggaatcaagcttgacatgcagacccaataaaaaccccttggagagaactggcctcatagttagtctacacagtccccacacagggttcctaacctatggtcagtaaagagtgtcactttctaacaggcctgggagctccaagtttatcttggaaccttaagaggagaggatcacccaactcacaggtatttgaggatacaaacccatagttgggctcggctttaaaggtcttatctgaaattccttgtgcaacaaagtttcatcaaagccaattcaaaaggcctgtgtagaaataaccattcctggccgggcacggtggctcatgcctgtaatcgcagcactttgggaagccaagctgggcaggtggatcacctgaggttgggagttcgagaccagcctgaccaatatggagaaatcctggactcttctaaaaatacaaaattagctgagcgtggcagtgcatgtctgtgaccccagctactcgggaggctgaggcaagagaacagcttgaacctgggaggcagaggttgcggtgagccaagattgccctgttgcactccagcctgggcaaatcatcaggccaagtataaaactaaagtttattctacaaacaacacacatggtcctatcataatttgtttttaccaaaaatgagacctggagaaattgtgtcccaaagcttatcatacatttgtcattaaatcctagtctcattaattgtttttaagctttttgcctacattttagactaaccctgtttattcctgtaaatcaagtggtgatctgcagcttggaagaaaaaaaaaggaatggagaatgtaaaaatctgaatcaatatactggttctgggcaattatcctataaattctgccaggtaataaaagtgagtaggggccaggcgcggtggctcacccctgtaatcccagcactttgggaggccgaggtgggtggatgacctgaggtaggagtttcagaccagcctgggcaacatggtgaaaccccatctctactaaacatacaaaaaaattatctgggcatggtggtgtgtgcctataatcccagctactaggaaggctgaggcaggaggatagcttaaacacaggaggtggaggttgcagtgagccgagatcgcgctattgccctccagcctgggtgagaaggcgagactccgtctttaaaaaaaaaaaaaaagaaaagcagggcgcggtggctcacgcctgtaatcccagcactttgggaggccaaggcgggtggatcacgaggtcaggagatcgagaccatcctggctaacatggtgaaaccctgtctctactaaaaatacaaaaaaattagctgggcgtggtggcgggcacctgtagtcccagctacttgggaggctgaggcaggagaatggcgtgaacccaggaggtggagcttgcagtgagctgagatcgcgccacggcactccagcctgggcgaaagagcaagactccgtctcaaaaaaaaaaaaaagtgagtagggtgcccatagcttggagatttctttgtttgggaaaataaaacaaaagaacttcataaacccccaaagggaaattctatatcttggcaagtaaaattttaagtggaaattatctactacaccacacttgtgggaattgctgtactcaccccactattttcaatagggttatacacggtagcaccttaaagctgaaatattggacagagtttccattgccgtagtattctgcttattatccttatagcagggatagtagttactaacgaaaaggaagcataaaagttactatcaccgaatctgccaggactttttactgggtttagtgatgcacttttaaatgaaacatgctgcttctggattaaaacctctactaaagtagaggaaaatctacaggtacttaaagatgaaatcaaaatcattgacaggctcagagaaaatgccggcttcagccccgggtggctacaatccctctttaatgaattcctgtcttctttatggaattggttaacccctttattaagccctgtcttgtttatatgtcttgtataaatatttggaccctgtatactcaatactgtaactcaaattgtttcctcttgcttagaagccatctaactccaaatggtgcaaactgaacaacccaaggacatgcccccacatgtgcctggcaacgtggctgcccccacatatccccacctgtgtaaaacatcattgcaccctgcatttgcatattaaaaggctagggtgggagggccagttttttcaaaggctacacgaataaaatgcctggtcaaaccagttccctgagccctatgcaaatcagacaccgcctcctccagcctactcataactggctggtatcccccgcacttgtggtctcctctgttggctttggagcccctctccctctgtctctgtacaggggagcttcttccttctttctgctcccttttttcttgcctattaaactctccactccttaaaaccactccatgtgtgtccatgtggctttatccaattcccacggaacaggagccctggtgttcctccactcatagaagctttattacttatatatatattctatatatccatcatgcatcctacaaagtgaaagcaactttttttttttgagatggagtctcactatgtaacccaggctggagtgcaatggcacaatctcggctcactgcaacctctgcctcctaggttcaagtgattctcccacctcagcctcccgagtagctgggactacaggcgcatgcaaccacagccagctaaattttgtatttttagtagagatggggtttcaccatgttggccaggctggtctcgaactcccgacctcgtgatccacccacctcggcctcccaaagtgctgggattacaggtgtgagccacaaagcccggccaaagtaacttattaattctgataatttttccctccctccctccctccctcactttcttccttccttccttcgttttgttttggtttttgagatggagtcttgctctatcgcccaggctggagtgcagtggcatgatctcggctcactcaacctcttcctcccaggtgcaagcgattctcctgcctcagccacctgagtagacgggattacaggcgtgtgccaccacactcgtttttgtttgtttgtttgtttgtttgtttgttttttgagacagagtctcgctctgtctccccagctggagtgcagtggcacaatctaggctcactgccagctccacctcccgggttcaaatcattctcatgcctcagcctccccagtagctgggactacaggtgcccaccaccatgcccggctaatgttttgtatttttagtagagacaggatttcactgtgttagctaggatggtctcgatctcctgacctcgtgatccacccgcctcggcctcccaaagtgttggaattacaggcgtgagtcactgcgcccagcctacacacactttttttttttttttaattagctgggcctggctgagcacggtggctcatgcctgtaatcccagcactttgggaggccaaggcgggcggatcaactgaggttgggagttcaagaccagactgactaacatggagaaaccccgtctctgaaaatacaaaattagccgggcatggtggcgcatgcctgtaatcccagctactccagaggctgaggcaggagaatggcttgaacctgggaggcggaggttgctgtgagctgagatggcgccattgcactccagcctgggcaacaaaagtgaaactctgtctcaaaaaaaaaaaaaaaaaaattagctgtgcctgtagtcctagctactgtggaggctgaagcaggaggactggttgagcccagttcaaggacgcagtgagctatgattgcaccactgtactccagtctgggcaacagagtgagatgttatctaaaaaaacagagtacaattcagtggtttttagtatattcacaaagttgtgcaatctatgccactatccagacattttaatcaacccaaaacgaaactctatgccgaatagtcactgcccattcccctctcttccctagccctgccaaccactaatctgtagggaccagccccacagggtcggtgggtctctccctgtgtgcggcgacgagagagtgtagaaataaagacacagacaaagagataagagaaaaggcagctgggcccggggggaccactaccaccaatgcccggagaccggtagtggccccgaatgtctggctgcgctgttatttattggatacaaggcagaaggggcagggtaaagaatgtgagtcacctccaatgataggtaaggtcacgtgggtcatgtgtccaccggacagggggcccttccctgcctggcagccgaggcagagaaggagaggagacagagagaaagagagcttatgccattatttctgcatatcagggactatttgtattttcactaatttactactgctatctagaaggcagagccaggtgtacaggatggaacatgaaggcggactaggagtgtgaccactgaagcacagcatcacagggagacggttaggcctctggataactgcgggcgagcctgactaatgtcaggccctccacaagaggtggaggagcagagtcttttctaaactcccccggggaaagggagacccctccccccactttcccggtctgctaagtagtgggtgttttcccttgacacttacgctaccgatggaccacagtccgcctggcaacgggcgtctgtcttcccagacgctgtcgtcaccactagaccaaggagacctctggtggctctgtccgggcataacagaaggctcgcactcttgtcttctggtcacacttcgctatgtcccctcagctcctatctctgtatggcctggtttttcctaggctatgattatagagcgaagattattataatattggaataaaaagtaattgctacaaactaatgattaatgatattcatatataatcatatctaagatctatatctggtataactattcttgttttatattttattatactggaacagctcgtgtcctctgtctcttgcctcggcgcctgggtggcttgtcgcccacactaatccactctcttaacccccctccctttttttttttttttttaagagataggggtctcattataatgttgcctaggctggcttcaaactcctgggctcaagtgatcctcttgcctcaacctcccaactagctgacacacgccaccacatcaggctttttctttttttttttttttgggacagaatctcattctgttcacccaggctggagtgcagtgatggtgtgatctcggctgcaacctccacctcccaggttcaagcgattctcgtgcttcagcctcccaagtagctgggatcacaggcatgtgcgccaccatgcccggctaattttctgtttttagtagagacggggtttctccatgttggtcaggctggtctcgaactcctgacctcaggtgatccgcctaccttggcctcccaaagtgctgggattacaggtgtgagtcactgtgcctggcctaattcttgtatttttagtagagacaaggtttctccatgttgcccagactggtctcaaactcctggcctcaagtgatcagtccaccttggccttgcaaagtgcaggggttacaggcatgagccactgcactcggtctatttttttttttttttttttttttgtagagacaagggtcttgctgccaggcgcggtggctcacacctgtaatcccagcactttgggaggccgaggtgggtggatcacgaggtcaggagatcgagaccatcctggctaacacagtgaaaccccgtctctactaaaaaatacaaaaaattagccaggcgtggtggcaggcacctgtagtccccgctactggggaggctgaggcaggagaatggcgtgaacctgggaggccgagccagcagtgagccgagattgcaccactgtactccagcctgggcgacaaagtgagactccgtctccaaaaaaaaaaaaaaaaagaaaagaagagacaagggtcttgctatgtggcccaggctggtcttgaactcctcttatcttggcctcccagagcgctgggattacaaggatgagccaccgcacctagatgctggctactttaagattttcactttatcagtggctttgagcaatttgattatgatgtgctttggtgtagtttcttgtgttagagaattgttgagcttcttggatgtgtagatttatgattttcatcaaatttggaaactgttaagctattagtccttaaggtattttttctgtgcccctctatctctcctttccttcaactccaattactcacatattagcctgcataaagttattccacagctcactgatgtggttttctttttactttccagacagggtctcactctcacccaggctgcagtgccgtggcacaatcataactcactgcaaccttcacctcctaggctcaagaaatcctcccatctcagcctcctaagtagctgggactacgggtgcacaccatcacacctggctaattttttcttttttgtagatatggagtctagctatgttgcccaggttggtctcaaactcctggcctcaagtgatcttcatgccttgacctcccaaaatgttgggattacaggtgtgagctactgtgcccagccatgtttttcattcttaaaattgttttttctgcctggccctgtggctcacgcctataatcccagcacttcggggggctgaggtgggtggatcatttgaggtcaggtgttcaagaccagcctggccaacatggtgaaaccctgtctctactaaaaatacaaaaattagccgagtgtggtggcacatgcctataatcccagctacttgagaggctgggccaggagaatcgcttgaacccaggagtcagagattgcagtgagccgagaccttgcgccagtgcactccagcctgggagacaagagtgacactccgtcttaaaaaaaaattgtttttttttctgtgaggatcacttgagcccaggaggtcaaggctgcagtgagccgagatggtgccactgcaccccagccagagtgagaccctgtctcaaaaaaaaaaattgttttttctctgcgtttcattttggatttcttttgctatgatttcaacttcactaaggcttccttctgcaatatctaatctactatcaaccctatttattgtacttttcatctctgacattgtaatcttttagatgcttgacttgggcctttgttttgtatctccttatcgctacttaattttttaacatatggcattcagttatagtaactattttaatgttttctgctcattgtaacatttgtgtcagttctaggttggtttccattaactgattattcttcttaatatggtcatgttttctgcctctttgcctgcctggtaatcttttcttaaaagtggggagcttttaaaccaatctcatcttctgggttaaaaagaatttttttgccattgaagttcatcttcatattccaatttttaaaaagcattctataaattttaatcatgtacaattatggggtacaccatgctgttatgatatatagatacagcatagagtaattgaatcaagctaattaacacgtttatcatcttaaatactcatcattttttcctgtctagctgcaactttgtactctttgaccaaagtcactccgtttcctccccacctccagtttctgctaactaccattctactctctgcttctattagttcaattatttcagattacacatttaagtgagaacatgccagaatgcggtatttgtctttctgggcctagttcatttcactcagcataatgtcctccagcttcatccatgtagttgcaaatcacaggatttgcttcttgcttctttttaaagttgaatggtattctattcaaatgtgtatatatacacattttctttatcttttctgtcttttcatctcttttttttttttttttttttttttttgagacagagtcttgctctgtcacccaggctggagtgcagtgacttggtcttggctcactgcaacctccgcccctctgggttcaaccaattctcgtgcctcagcctcccaagtagctggaattacaggagtgcaccgtaccatgcccggctaatttttgtatttttattagagacagagtttcaccctgttggccagactggtctcaaactcctggcctcaggtgatctgcccgcctcagcctcccaaagtgctgggattatacacgtgagccaccacgtccagcctgttttttgtttgtttgttttttgtttttgagatggagtctcactctgtcagccaggctggaatgctgtggtgcaatctcggctcactgcagcctctgcctctcagcttcaagcgattctcttgcctcagcctcccaagtaactgggattacagacgcctgccaccatgcccagctaatttttgtatttttagtagagatgggggtttcaccatgttggtcaggctgctctcaaactccttacctcaagtaatctgcctgctttggtctcccaaagtgttgggattacaggcgtgagccacagcgcctggccacattttctttatcctttcatctgctgatggatgcttaggttgatgtcatgatttgcctgttgtaaataacactgcagtgaacctggaaatgcagatatctctgacacactgatttttcagttcctttggatatacacccagaagtgggattgctggatcatttggtaagtctacttttagttttttcgttttgttgttgttgttgttgttgttttaaatgagtctggctctatcacccaggctggagtgcagtggcactatcttggctcactgcaaacctccacctcttccctgctcatgcaatccttccacctcagcctccctagtagctggaactatggtgcatgccaccatgcctggctaatttttgtattttttgcagagacgggggttttaccatgatgtccaggctggtctcaaactcctgggctcaagtgatctgtccacttcagcctcccaaaagtgctgggattacagatgcaagccaccacgcccagcctatattttgaggaacttccatataattttccagaatgactgtaataatttacattcccacgaacggtgggtaagggttcccttttctccatatcttcaccaacaccagcaccaacaggtgatatctcatcgtgcttttaatttgcgttttcctggtggttagtgctgttgaacattttttcatatatttgttggtcatttctgtgtcttttttttttttaatatctgttcaggtcctttgcccattttaaatcagcttatttgtttttttcactctgagttttttgagtttcttatatattttgggtattaacaccttattggatgtattgcttacaaatgttttctcccaatctgtaagttattacttcattctgttaattttttccttatgcttggtaatccttgattgcttatcagacattgtaaattttaccttgtagaacaccaaatatttgtgtaatctttatgatttgttagacaggtccagattaatgctcagtgtaggcttaatttttttttttttttttttttttttagatagagtctcaccgttgcccaggctggagggcagttgtgccattttggtgcactgcagcctctgcctctggagttcaactgattctcctgcctcagcctcctgagtagctgggactagaggcacacgccaccatgcctggctaatttttgtatttttagtagagagtgggttacaccctgttggccaggctgctcttgaactcctggcctcaagtgatctgcccaccttggcctcccacagtgcgattacaggtgtgagccaccgtgcctgcccggcctttttaagagatgtggtcttgctgtgttgcctgggctggtctcaaagtcctgacctcaagtgatccacccatctcagcctcccacagtgctgggattacaggcatgagccactgcaccggaagtctaggtttaattattccccattactgagacaagatcttcctgagcactctaccccatgcctagcgaatgatcagtttttccagctggccagtgggaagaggtcctggccctacctcgtgtgaatcttgggcgttgtttcctcgaatcctttcagctggttctttccctggccttggagagtttcttcacacacatgtgctgattagttctttgctgaatcctctgaagtcctctggggtactctctctgtgcacctctgtcttgtaggtgttccattatctaagctctagctgctgtggtctcctcggactcagccactccatttcctcaactctgcgaatcctctgggctgcaacaacccacatcccccttgccctgccccacactttggaaacgctctcgaagcagtaaactgcacagtcctaaaaggactgttgatgtcctttctctctgggatttcattgcttttgttactttctctcattgcttgatgttcagcgttttgaacactgttgttccatgtattgggtctgtttttgtcactgtggtggtggtgattgtttcagacaggagggcggacccagcccacgtgactccatcttggctggaagcaggaatctcgggatcagtggtttcaaagctcctcaggtgattccaggggacgctgaggtgaggaccacttgcagagactcctctgcttgaaatatctctcaatcaaatggaatcttcttttgttgttcccaccccttcattttctctgttctctctttctgagttttttctttgtttttgttttttgagacaaggtcatgctgtgttgcccaggatggagtgcagtggtgccatcacggctcactgtagcctcaacctcccgggctcaaacaatcctcctgccccagcctcacgagcagctgggaccacaggcccataccatcacgtccagctatgttctctctttctggaacttctgttaaacaaatatggattgaattgattctccatctcttttctttcatattttcctttcttttctttcttttttgttggcattttgctctacatcctgagaggtgtttcaaaacttttccacccgtaccttcctttgattaattttttatttaacttaattaattaattaatttttgagacatggtctcactctgtcacccaggctggagtgcagtggtgcaatctcagctcactgcagactcaacctcctgggctcaagtgatcctcctacctcagcctcctgagtagctgggagtacagatgcactccaccatgcccggctaattattttattttttgtagagatggggttttgccatgtttcccaggctgtgatggatttttaaatttggtccgtcgtatttgtgacttccagaactttgtcttgttctccaattgcagcatcttcctggaagcctcttcttggttcgtggtgcattatcttattcattcctttcctccagggctagtgttctgctattcttcctttcttttttttttttgagacagagtcttgctctgttgcccaggctggagcacagtggcgtgatctcagctcactgcaagctccagctcctgggttcacgccattcttctgcctcagcctcccgagtagctgggactacaggtgcctgccactacgcccggctaatttttttgtattttcagtagacatggagtttcaccatgttagccaggatggtcttgatctcctgacctcatgatccacccgccttagccttccaaagtgctgggattacaggcatgagccattgcgcccaggctttttttttttttttttttttttttttgagatggagttttgctcttgttgcccaggctggagtgccacctgcagcccagtgatcttggctcactgcaacctctgcctcctaggttcacgcaattttcgtgcctcagcctcccgagtagctgggattacagtcatgtgccaccatgcccggctaattttatatttttactagagatggggtttcaccatgttggccaggctggtctcgaattccagacctcaggtgatccaccctcctcagcctcccagtaagccactgcacccaaccatctgctattcatcttaatcctctctggtggcaccgaaatgaagaggagacccatgtggatctccctgcagccgggtgagtctggttccacaggaggccttttcctgaactggctgcaggctccgcgggcaggtctgttaattggttaaaatgcttcattcagttaggtgggttttgttcccttctccccacccagaggacatttgggaatgtcgggagatatttttggttatggcagctagggggatccttctgacacctagtggatagaggccagaaatgccactaagtatcctaggacatgcaggagagcctctcaacgattaagaatcagctgtcccaacatgttaatagcacataggtcggagagacaccctgatttaaggccatctgagtacaggctccccagctctcaccaccaaaggccaagataaggagggtccctctacagccacttcagggaacttccaagggagcttgttcaattatgtttatttattttatttatttattttttttgagacggagtcttgctctgttgcccaggctggagtgcaacctccacctcccaggttcaaacgattctcctgcctcagcctcccaagtagctgggattacaggcacctgccaccacacccagataatttttgtattttttgtagagaaggggtttcatcacgttgcccaggctggtcttgaatgccatgaccgcccccagttgtgcttagaagataccgccaacaggccgggtgcggtggctcatgccttaatcccagtactttgggaggccgaggcagctggatcacgaggtcaggagttcgagcctggccaagatggtgaaaccccgtctctactaaaaataccaaaattggccaggcatggtagctcacgcctgtaatcccagcactttgggaggccaaggtgggtggatcatgaggtcaggagatcaagaccatcctagctaacacggtgaaaccccgtctcaaaaatacaaaaagttagccaagcgtggtggcacacacctgtagtcccagctactcagaaggctgaggcaggagaatcgcttgaacccaggaggtggaggttgcagtgagacaaggtcgtaccactgcactccagcctgggcggcagtgtgagactccatctcaaaataaataaataaataaataaaatattaaaacataaaaatacaaaaattagccaggcaaggtggcgagtacctgtaatcccagctactcaggaagctgaggcaggggaatcacttgaacctgggaggtggaggttgcagtgagccgagatcacgccactgcactctagcctgggtgacagagcaagactctgtctccaaaaaaaaaaaaaaaagaagacacctccagctgacagatcatgagccacatgtggcccaggcttgtcttgtttggcttttatagggagatagatttatatatatatacatatatatatatgttgttctgtagtgttgcgtcatgagatattgaaaaacacacataactttttttaaaatttgttctgggccaggcgtgtaatcccagtaatttgtgcagctgagatgggaggatcgcttgatctcaggagttcaagaccaacctgtgtgacacagtgagacactcatctctacaaaaaattaaaaattactggggcatggtttcgtgcacctgtggtcccagctgagatgggagaattgcttgagcacacgaggtcaaggctgcagtgagccaagatcgcaccgctgcactccagcctgggcgacagagcaagatcctgtctcaaaacaaacaaaaacaaaagtaaaactacaatgtgaatgcaagttttctcagaatatacatcctttaatattttgatctttgaattttcaatcactatctaccacagaatgttccctttccaaattacaactaatttataactcagtaaggaacactctgggacaagttcttttttttctttcttttttccaactctggatacagattggcagacagcagtcttgagagcttgttgggagggtctagcaggggagcacagctacttgtatgcccttgaccgaagactggtccttgtctatcggggatggttgtcctctttaacggagtgcacagcttcaggaggttgcacatggagtagtgagggaggaaggggacacccacctagccagccaggtcagctgaatcaaccctggcgatcagtggggtaacatgttgcagccagatcgccctcacatccaggcagcagtctttagtgaagtgctaacattgttcaacagagaaatccaatagctaggttggaggtgggcagagaaagggaagttataaaactcaccaggctgggcgcagtggctcatgcctgtaatcccagcactttgggaggccgaggcgggcagatcatgaggtcaggagatcgagaccatcctggctaacacggtgaaaccccatctctactaaaaatacaaaaaattagccaggcgtagtggccggcacctgtagtcccagctacttgggaggctgaggcaggagaatggcgtgaacccgggaggcagagcttgcagtgagctgagatcgcaccactgcactccagcctgggcgacagagcgagactccatctcaaaagaaaaaaaacaacaacaaaaaaactcaccaaagatttggctaacatcacatcaaaaggagtattctcattttacttaaaatgcccacatttgtgtttgttttgttttgttttgagacagagtttcactcttgttgcccaggctggagtacaatggtgcgatcttggttcactacaacctccgcctgcccggttgaagtgattctcctgcctcagcctgctgagtagctgggattacagatgtgccccaccatgcccggctaattttttgtgtttttagtagagatggggtttcaccatgttggccaggttggtcttgaactcctcacctcaggtgatctgcttgcctcagcctcccaaagtgctgggaatccaggcgtgagccaccacacccgaccccacatttgtttttatgatagaatgttttcataatttattatattactaagttgtgttttagatttttcagtttcaagtttggtttctaaaataaatgagtacaaaccacaagctcagtttctcctgaaactctcacagcctgcttctgacgtcagatgtgtgtgggttgcacactgcgttaatccattctcacactgctataaagaaatacctgagactgggtaatttataaagaaaagaggtttcattggctcacggttctgcaggttgtaaagaaagcatctgctcagcttccggggaggcctcaggaaacttacagttatgacagaaggtaaaggggaagcaggcacgtcttacgtggccagagcaggaacaagagagagagtgaaggggtaggtgtcacacacacattttttttttttttttgagatggaattttgctcttgtcacccaggctggtgtgcaatggcacaatctcggctcactgcaacctccgcctcccagattcaagcaattctcctatctcggcctcccaggtagctgggtttacaggcttgtgccaccatgcctggctaatttttttttttttttttagatggagtctcactccgtctcccaggctggagtacagtggctcgatctcggctcactgcaacctctgcctcccagattcaagtgattctcctgcctcagcctcctgagtagctgggtttacaggggcgcaccaccacacccggctaatttttttattttcagtagagacggggcttcaccatgttggtcaggctggtcttgaattcctgacctcgtgatccacccgcctcggcctcccaaagtactgggataacaggcgtgagccactgcgctcagccaattttttgtatttttagtagagctggggtttcaccatgttggtcagctggtctcaaactccagacctcaggtgattcacctgtctcggcctcccaaagtgctgggattacaggcatgagccaccgcacccggccagtttcacacacttttaaaccaccagatctcacaagaactccctctcacgacgacagaaccaagggggatggtgttaaaccatgttaaatcatgagaaaccaccctgacaatttaatcaccccccaccaggcatcagctccaacactagggtttacaatttgacatgagatttgggcagggacacagatccaaaccatatcacacaccaaacaagcaatcagttctactgcagacaccagctgggtgtcctctgatttttttttttttttttgagacggagtctcactgtcgtccagtgagattgcagtggtgcaatcttggctcactgcaacccctgcctcccgggttcaagtgattcctctgcctcagcctccggagtacctggggttacaggtgcctgccaccacgcccagctaattttttgtgtttttggtacagacggagtttcaccgtattagccaggatggtctcgatctcctgaccttgtgatctgccctcctcggccacccaaagtgctgggattacagtcttgagccaccgcgcccggccatgtccactgatttaatccaattataacatcatctacctggagatagcgtcacatctcacggggtgagggctgcatcccacaagactgcccctgacttccgatgccaattgcaagccccaggtttttttacctgcacttctaaccaactggctaataaatcagggttctcccggccctgcccttgggtgacattaacttgctagagtggctcacagaactcagagaaacatgtttaccagtttggttattataaaggatatttcaaaggccaggcacggtggcttatgcctgtaaacccagcactttgggaggtcgagacgggcagatcacttgaggtcaggagtttgagaccagcctgggcaacatggtaaaacccccatctctacaaaaaatacaaaaattagccaggcatggtggcatgcactgtaattccagctactcgggaggctcaggagtttgagaccagcctgactaacatggtgaaaccccgtccctactaaaaaatacagaaattagccgggcgtggtggcatgcgcctgtaatcccagatacttgggaggccaaggcatgagaatcgcttgaacccaggaggcagagtttgcagtgagctaagatcacaccactgcactccagcctgggtgacagagcaagactctgtctcaaaacaacaacaacaaagaaaaccaaagtgatccacccaccttggactcccaaagtgctgggattatagacatgagccaccatgccctgcctttttttttttttttcagacaggatctctcgctctgttacccaggctgtagtgaaatagtgtgataatgtgatcacagcttcctgcatccttgaccgcccccagcctcaagtgttccttccacctcagcctcctgagtggctgggactacaggtgaccgccatcatgcctggctaatttttgttttttctttttttagagatggggttttgccatgttgtccaggttggtcttgaactcctgggctcaagtgatcctcctcccttggcctctcaaagtgctgagattacaggctatgagcctctgtgcctggcccctaaactttttccaacccaccattccaccatgctccgtgtatcagctctccatactttatgacttcattgctttagtcactgttctgctacttgcagcctagggcattcctaatgacacatggtccacattagactttacagatagcctcattttctactagttttgcctatgaggaagacagccctagaaagtgacagctagattgagacctaaagagtaagaattagccaagatgaagtagtgggagggaggaagatggatgttgcaaaaggaagggagtgtttgttgaaatgatcagaagttggaaaaatcttttaagcatttttcttttctttagagatgggttctctgtcacccacattggagtgtagtggtatggtcatagctcagtgtagccttgaactcctgacctcaagggatcctcctcttcagcctcctggaattacaggcatgagccatcatgcttggctaatttatttttaaattttttgtatagacctggccacgtgtgagggctcatacctgtaatcccagcattttgggaggcctaggtgggtggatcatctgaggtcaggagttggagaccagcctggccaacatggagaaaccctgtctgtactgaaaatacaaaaatttgctgggtgtgctggtgcacacctataattccagctatttgggaggctgaggcaggagaattgcttgaactcaggatgtggaggctgcagtgagccaagattgcaccactgcactccagcctgggtgacagaccaatactctgtctcaaaaaataaaaataaaaataaattaaataaataaaaataaattctttgtagagaccgggtcttgctacattgcctaggctggtctcgaactcccagtctcaagcaatcctctcacttcagcctcccaagtagctgggattacaggagtgagccaccacatccgacccttttaagcatttttttttttttttttttggcaggcttactccaggtgcaatgtggaaaatagagacaggggaacatttaagcgcagtttaggagcaatgagtggagcagaaccaggatggaagaagtaagcatgaggagaagcaggcagaagtcaggggtgtttggaggtgctgatggggggcagaaaggagcctaggagaaagaagagtattaggcttggtgggggtggtcatgcatcctaaaataattttgaggtcttcacagggggatattgaagtggctgttagagagatagggtttgaagtcaggagagagacataggttaagacataggtttgggttcatgttacagagacccaggacgacagtgatttatacaaaagaaagtgttagttctctgtcgtgtaattacactgaggcaggcagttcaggtgtcctgtgctggctgcagggattcaagctccttccatctcctggctcagccaaccctggcatgctgccgttgtccatgatatctcaccatcatgtctggattctaaatagcaggagagagaaagaggagtggggaagaggagccagaaccagttgcatggatgcccttagccacaagggggtctgggaaatgcagcttttcctctgggtggccacaagcccagttaaaaataatggtgctggcaacgtgcatggcacacggctggaatcccagcactttgggaggctgaggcaggtggatcacttgagcccaggagctcaacaccagcctggccaacatagtgggaccccatctctacaagaaatacaaaaaatagccaggtgtcatggcacatgtctgtagtcccagctacttggaaggctgacacaggaggattacctgaaagtgaggaggtcaaggctgcagtgagctgtgattgcaccactgcactcgtcttggcaacagagcaagactctgtttcaaaaaagaaagaaaaaaagaagaggttgtattagtccattctcatgctattaataaagacatacccgagactgggtaatttataaaggaaagaggtttaattgactcacaattaagtatggctggggaggcatcaggaaacttatacagtcatggcagaaggggaagcaaaaacatccttcttcatgtggcggcagcaaggaaaagtgctgagccaaaggagcaaaagtcccttataaagccatcagatcttgtgacaactttatcaccagaacagcatggaggtaaccaccctcatgattcaattgcctcctacgacacgtggggatacagccaaaccatatcagaggtagtgctattcctttaaaataatgcgagaatagatctaggaggaccacatctgccaccgctggagatggagacatggggaacatcagggtatgagatagtaattggggccaggcgcagttggctcacgcctgtatcccagcactttgggaggctgaggcgggtggatcacttgaactcaggagttcaagaccagcctgaccaacatggtgcaaccccatctctagtaaaaaaaaatacaaaattaggctgggcgcggtggctcatgcctggaatcccagcacttagggaggatgaggtggacggatcacctgaggtccggagttgaagaccagtctggccaacatggtgaaaccccgtctgtactaaaaatataaaaattagccgggcatggtggtggatgcctgtaatctcagctacttgggaggcagaggcaggagaatcgctcaaacctgggaggcggagattgcagtgagctgagatcatgccattgcactccagcttgggcgacaaaagcgagactccgtctcaaaaaaaaaaaataaaatagctggacatggtagtgtgcgcttgtaatcccagagacttgggaggctgaggcaggagaattgcttgagcccaggaggcggaggttgcagtgaactgagatcatgccattgtactccagcttgggcaacaagagtgaaactccgtctcaaaaaaaaagagatagcaattggagccttgggcctaggtgaaatttcccagaaggagtgcagagggaggggaaaagcagcccaggactgacctttgagaaggcatgccgccagcaaagagagtcagagagcacggctgggtagcggggagggaaagcaggtgtgtgtaaagccacagagccatggggagagaacatttccagaagtgtccagtgctgtctgcaggaggcttgaaagtgtcctttgattaaaacagcaggtcatgattttgatggcagtcgtttctgtagagtgctggaagcccatggaagcctgcaaccagttgcagagggaggggaagatgagaaagtgtagactgctaggacagacggctcttcccagacgtttggctgtgaaggaggtgagaagtcgtgctgtgtgtgaggggtagagaatgagttgttggagctggacatgactcacccctgtaatccctgcactttgggaggctgaggagggaggatcacttaaggctaggagtttgagaccagcctgggcaacatggtgagaccctatgcctacaaaagtcaaaatactagttagatctggtggcatgtgcctgtaaccccaggtacttgggaggccaaggcagaaagatggcttgagcccaggagattgaggctgcagtgagccgtgactgcaccactgcactccagcctgggtgacagagtgagaccctatctcagaaaaaagaaaaaaaaaaaaaaagagttgttggttggctggttgttttaaggtgggagagatgtcaacttatttatatggggaaatagccttttgggtgatagtgtgaatggaataacctgacaagcatgtcctcaccactatgcatctagaagcgctgcataaaaccaaacaaacatcctttaaaacatgcagcttagttgcaaaaaagaaagggaaatccccaggaggcacgaagaggaaactgaacactagagctgtgcaacttgctgggtggctgtgatcttggcattgaagggcctagggctttacacctacctagagattggagataaggccttgtctggggaactgaaaacataaacactaatagaaagcttgtacccttaaggggtgacatccttggtgaaagagtaaactaggaaaaaaatctgcctccagttcagggagcataaaaggaccttgtctgtttcactctgagatttggtgacaataaatggtctcttttgagaattcataaccaaaggcttggcctcacttggacttggggttcaagtttacatcatctgcatggtctgggaagcccaaatgtcaacaaataatatagtccaggccaggtgtggtagctcgtgcctataatcccagcactttgggaggctgaggtgggaggatcacctgaggttaggatttcaagaccagcctggccaacatggtgaaactacgtatctactaaaaatacaaaaattagccgggcatgttggcaggagcctgtaatcctagatactcgggaggctgaggcaggagacctcgggaggtggaggttgcttgaccctgggaggtggaggttgcagtgagctgagatcgcaccactgcactccagcctgtgcaacagagcaagactctgtctcaaaataataataataataaataataataataataataataacaatgtagtccagggttggtaacacccatgaagagctcttggcagaagcagatgtgaaacctctttgaaccttggtgggcatgtgcattcccactgataacaccctgctgaagctgaattcacagctcaaaattacaaaacataagaggaaacaatcttcatgaatgacagtaagcagacacagcatatagcaggattagctccaactccagaactccagagaatagcattatttggcaaagaaccatacagcaagtgtggtttaaatttctaaagatataaaagaagacatcaatatgagaaagaaataagatggtgttaaaaatgagtgggattccggtcaatgaatgcgtctaaaaaaaaaagtgagcaggagaggtttaaagtaaaaagaagaaacagtaaaatgaatgtgtctgttaatctatgaacttattcattccccattcattaggctcctatagtgttttagaccatgttctgggtctggaaatataaagatgactctgcagatagcaagttagactctgcctcaggaagatcgcatgcagaaatccatgtatcaatgcatccatttatctatacatccactcatccacacatccattctcttcacctatccattctcccatccatccatccatccatccatctattcatccatccatctgtccgtctgtccatctatccatccatccatttattcatccatccatccatccattcatccatccatctagtcttccatccattcatttatttatccatccatccatccatccatccatccaaccgtctttcattttactcactgtgggggaaagaaagagagatctgactgttactgtgtctctgtagaaagaagaagacataagaaactccattttgttctgtactaagaaaaattctgccttgagatgctgttaatctgtaaccctagtcccaaccctgtgctcgcagaaacatgtgctgtgttgactcaaggtttaatggatttagggctgtgcaggatgcaccttgttaaaaatgtgtttgcaggcaatatgcctggtaaaagtcattgccattctccattatcgagtatctagggacagaatgcactgcggaaggctgcagggacctctgcccaagaaagcctgggtattgtccaaggtttctccccactgagacagcctgagatatggccttgtgggaaggggaagacctgactgtcccccagcccaacaccgtaaagggtctgtgctgaggaggattagtgaaagaggaaggcctctttgccgttgagataagaggaaggcatctgtgtcctgctcgtccctgggaacggaatgtctcggtgtaaggcccgatcatacattctatttactgagataggagaaaactaccttatggctggaggtgagacatgctggcggcaatactgctctttactgctctgagatgtttgtgtaaagtcaaacataaatctgacctacgtgcacatcgaggcacagcacgtttccttaaacttatttatgacacagagacctttgctcacgttttcctgctgaccctctccctaccattaccctatagtcctgccatatccgcctcactgagatagtagagatagtgatcaataaatactaagggaactcagagaccagtgcccgcacaggtcctccgtatgctgagcgctggtcccctaggcccactgttctctctctatactttgtctctgcatcttatttcttttctcagtctcttgccccacctgacaagaaatacccacaggtgtggaggggctggcccccttcactcattctcaaatgtcacagctagaaaagtcccaatagaacatcttgttcaactttcagctgtctttttgtacatgaaaaaagcacatgaggccccataatacaaaactctgttttctgaagtctctaagtgaataaggtgatggaggcagatcatgaactggggccttgtccctgcatttcttccacactgcagtgcctttcctgaacccatggcatggaagcatctgacctctgaacacctgcctgtatcttctgtttctctcaggtctgttcactcctcgtgggcagagtccccacaacccagtgctgtcaactgatggtgatgataaggaatgtcattacccagctcatgagtgatagagatgggacagggccctggtctctccctggtgtcagttttgtgtccatatcttagctcacccctacctttgttccctactctgccgctagagagactgtgagctccttgagggcagggcccaggtcttattcctcccctcccagtgcccagctcagaaacagtgcttaggatgctggccagtgactacacctgggagaagagactggactaggctctcggtccctctgcctggggtttctggctgctctgtcaacttccaacatcccaaaaatcagaggggaggtcaagggattggatgagaggctccaagtgctccttagcccactgtgcagggagaagtgagtgtttcctggctgtgggtgaacttcgtggacagcattaaacaacacagcatcccgccccctgtgcggggctgtctgtctgccttggcacttccagaaggtctcattgtggtgctagagtatctaacactttctgacttgcagatcaacattcccttttcttgttaacaaagagcagtgccgggcgcggtggctcacacctgtaatcccagcactttgggaggctgaagcgggcagatcatgaggtcaggagttcgagaccagcctggccagcatggtaaaaccctgtctctactaaaaatacaaaaattagccaggcatggtggcaggcgcctgtaatcccagctacttgggaagctgaggcaggagaatcgcttaaacccagaggcggaggttgcagtgagcggagatcgcgccatcacactgcagcctgggcaacagagcgagactccgtctcaaaaacaacaacaaaaacaaagagcagagttttaggtcaatgcttccagcagggaacagaatttagatcttaacaattttgtttacattgtatttattttcatgttttaccttctattgatggcaaatgagactggttttccatttacagaagtgatacaaaagattcctgttgcaataatttcattaagtgaataatgagccaatttaaagaaaaatataaagcaaataattgtacagatggtaaactaatatggcaaaatcactaatattcaaggctgaagtttggccgggcatggtggctcatggctgtaatcccaacactctgagagatggggatgagtggctctctcgagcccaggaattaaagaccagcctgggcaacatagcaagaccctgtctctaaaaaaaaaaaatagccaggtgtggtggtacatgcctgtagttccacctactagggagactgaggtgggaggatcacttaagcccaggagttcaaggccgcagtgagctgagattgtgccactgtagtccagcctgggcaacagagtgagaccctgtttcaaaaacaaaaaaaagtggccgggtgcagtgctcatacctgtaatcccagcattttgggaggctaaggctgctggatcacttgagcccaggagttggaaacctgcccaggcagtatggtgagaccgtgtctctacaaaaaaaatacaaaaattagctgggcgtggtggtatgcacctgcagtcccagctattctagaggttgaggtgggaggatcgcttgagcctaggagttcgaggctgtagtgagttgagattgtgccactgcactccagtctgggtgacagagttgagattctgtctcaaaaaaaaaaaaaaaaaaaaaaaaaagacaaagtttggaaaattaaacccccagggaaatggaaactacatctgctgctcacccacctgcctgcctctcctaaagggaagattgggtacttggggtcccatttctgtagggtggagcattataagtaagcctagcttgtggcaaatctgtctctctggacactccagcaagctggaagggacgatgatcagaggtcacagtttgggagttgccctgctctaggacaacgctcctctccacattggatgaaactcagtttcccctggccatggccttcctcaccatggagtggtgagggtccgaggctgagacgtgtgcagatggaggagaatgggcagaggagcctgtgggttttctctgactctaggtccccactccagcaagacagcgccgctgcagcttggcccagcaagttcctccttgcagtttgggggtcaaagccacagttcatatgaaacaaaatgttcctctgcctggtctggtcctctctttgtgtattttcctagaggacctcacagtgggtgagtggccaaggagaacaggatttgtggctctgggaaactggattcctgtcatctcctgccagctgtcatcgccacaccgaggctgttcagcaccgcaggacccgttctctttggtattggtggcttcggtaaacactgaaagaaggtggaggtggctggtcgatgccatttcctgactatctagtaccttgggttcttcatctggatgcgatcttgaaggcttctggcctggcattggctccacccccaggtctctgagccacagcccaggtagctgagcagaggcactgctgggcttcccctagtccacatagcctggccaccacccagacccggggagggggactccaggtggaaggagcctgggaagggcatcttcgctggggcagtctcaatcctaatgctggatcctggggtccccggtcccactgaggcaaggcctgcctcggggatctctggggaaccctggggattcagaaccccacactggtccggccttcacgcttccagaaagctgagatctgctccaaggtgacccgtggctggaggccccactcaggatccgggctccctggccgctgcctcctggcctgggggctcccaaactggacgctggcctctggcctctgctcgggttcagcccagctcaccaggcctgtggcggggggcctcccctcccagggctggggcccccagaaggtgctccgggctgggacctccagtacggtctgggggcccaagttgctgggagcagaatttggggctgagggggcaggtggggctgttgctcgggcctccaaagtgcccacctgggtgggaggctcaggggcccgatctgtcagcagggggaccgcagagccataccagtcctcagagcgctctcgggcggtgcccatgggctcaatccacagctctcctcctgggcgccacaccagggtgggtgcacggtggctggggtctgggcggagagcacggcggaacaggcgttcagccaacacagcggtggtgaggatgaagagcgcagccagggtggccaggaccagcatgatggggatgcagggcccacagggcagtgagggccatggggctgcttcccatgcggggggcccctccacgcgcccagagggcggctctggagtcaacggcatctgagagacacaggggtgagaagaggaagtaaatgaggcagagggggcacaaccaagatgagagagaggcagcaggtgtccaggaaagcctgggagaagggctgggcatgggggctcatgcctggaatcccagcactttgagaggtcgaggcgggaggatcacttgagcccaggagttcaagaccagcctggacacacagtgaaacctcatctctaaaaataatttaaaaactagctgggtgtggtggctcacacctgtagtcccagctacacaggaagctgaggtgggaggattacttgagcccaggagtttgaagctgcagtgaccccagattgcaccactgtcctccagcctgggcaatagagcaagaccctttctcaaaaatgaaaaagaacattctggagagacagagaagcaagagggaccagaaagggtaagcgtgagccaggtggggtgggaggacaggcagcctacctcggggcacagccaggccctcctgcctggctctccaggcctttccagaatccccatttccctcccagaccccagggtgcctcagacaagaaaggtctcaagggcttctttcctccccactcggccccctcaagtcttgctcagacctagagaggaagtggtgggtgaagaaatgagaacctcccctcccactggctcccctgcgtgtgtctcccccaccgcctgccgccagcacctccgctggccccttgaggctccttcgcccctcaccattctcctcggacttgatcttgctctcataggctccacggaatctgctgccgggccgggccgggccaggcctccggaggcgcctctgcacccctcctgggctccccagctttgcccaggctctggcctgtctctatctctcgtttgtctctgcacacctctctgtcccccacatcctccatctgcagggggcctcctgcacccctcaactcaccttgggtcagtccctgggctcctctccctcctagagccactcttcctggtgctggactaagaggtgcaggcttggagggtgcagggcggtccgcctctcagacgtagaggcccggcctcggatgaaggcggaagggagggcaccgcctgttgctgggcaactgtgccccaactcgtctgcccctggggagtgtttgtttccaaagcaacccaaggggatgtggtcactgcggtgaggaggcttttcctggggtaaggtggggctggaatgggcaatggttctgttgaacttagtgtcaccccatagccaggccctgagccccagaacattcaccgaaaagctgagaaagaggacgccggggccaggcacagtggctcacccctgtaatcccagcattttgggaggtcaaggtgggcaagtcacctgaggtcaggagttcgagaccagcctgccaacatggcgaaaccccatctctactgaaaaatacaaaaattagctgggcatggtgacgggcacttgtaatctcagctgctcaggcggctgaggcagggagaatcgcttgaacccgggactcggaggttgcagtgagctgagatcgtgccaccacactccagcctgggcaacagagtgagactccgtcttaaaaaaaaagaaaagaaaagaaaagaaaaagaaataggacactgggactttagcccgtacattcccagagaaccatggtgcctcccccgttcctcctgggaggatgccccaccccatcctgccttgtcttatccacggtgcctccccagatctgctcctgccatgcagcccccacaggcaccccctgcttggccagcttgcttcacaccttttttttttttttctggtagagatgggctcttgctatgttgcccaggctggtctcaagctcctggcctcaagagatcctcctgcctcagcctcccaaagtgctgggattacaggtgtgagctaccacactggcccctgcctcatacttttaattaacataagtctctctctcttcagaccatttagcccccattttggttggaaaatatcagtgaggtgaggcttgggtaacaaaaatgtcaagcctctgagaggagtccagggtataaaaacaggcgtgggcctgtttccaaaaccctgaccatcctcatgtctgtccctctttcctgctgctgagggtgggaggagcctggagcagagtgtgacaagatgtcatcaggctctggagtccaggtgactttctgagattctctagtttgactcatccacagatgacaaaagtaaggcttaaagaaaagagatttcatgaccaaagtcgcatgaccaatgtatgtgtgggtgagcatgtagtggccagggtggtggaagaatagatagaaatccctgggctgggcgaggtggctcatgcctgtaatcccagcactttgggagaccgaggcgggtggatcacctgaggtcaggagtttgggagcagcctggccaacatggcaaaaccccgtctctactaaaaatacaaaaattagccgggcgtggtgccgcacgcctatgaccccaactactcaggaggctgaggcaggagaatcgcttgaacccggtgcagtgagccgagatcgtgccattccactccagcctgggcaacagagcgagactctgtctcaaaataaataaattaaataaataaatgaatgaaaagacagtctccgtcagactgccccatcctggtggttttgagccctgctgggaggagctggagatggagagtccgggggaaaccgcctttgcaaagaaagagatctaacttaactgactccaccttgcttctaacctccaagctgtctttgtttattcctgggcgtaggctgaactaactttgggagaaacttagtttgtagtttatagtttaaacaaagacagtaacagccctttcccaaagcagaccttcttgcctggggactagactaacactagccataggattagaaattatggtttaggagtcatgcagctggaggctacaagattctgaccctccctaaactgctcctaacatcagtgcttgagatattttgcagaccctgcacttgatggatcagctggcaccacccagatcaataaactggctcatctgatcttgtggcccccacccagaactgactctgcaagaagacagctctgactcctgatgatttcatctctgaccaatctgcactcccagatcccagcactttgggaggaccagacaggcagatcacaaggtcaggatgagaggtgacagcgtgctggcagccctcactcactctgggcgcctcctcggcctccacgccaactctccctgcgcttgaggagcccttcagcccgccgctgcactgtgggagcccctctctgggctggccgaggcgggagcccgctccctctgcttgccagaggtgtggagggagaggcgcggacgggaactggggctgcgggccacgctcgagggccagcatgagttccgggtgggcgtgggctcggtgggccccgcactcagagaggccggctggcgccattggccccaggcagtgaggggcttagcacccagaccagcagctgcagagggtgcgccaggtcccccagcagtgccagcccacaggtgcacttgaattctcgcaggcctcagctgcctccccacggggcagggcttgggacctgcagcccgccatgcccaagcgtccccctgcctgggctcctgcaccgccccctgctctgcggggcctggtcccatcaaccgcccaagggctgaggagtgcaggcacaggattggtgggcagctccacctgcagcccaggtgctaggtccactaggtgaagccagctgggctcttgagtctagtgggcacttggagaacctttatgtctagctaagggattgtaaatacaccaatcagcactctgtgtctagctcaaggtttgtaaacacaccaatcagcaccctgtcaaaatggaccaatcagctctctataaaacagaccagttggctctctgtaaaatgggccaatcagcaggatgtgggtggggccagataaggcaataaaagcaggctgccagagccagcagtggcaactcggcgtacccttccacataggaagctttgttcttttgatctttccaataaatcttgctgctgcttatcctgggtctgcactgcctttatgagctgtaacatcgtgaaggtctgcagcttcacgccagaggccagcgagaccacgaacccaccagaaggaagaaactcggaacacgtccgaacatcagaaggaacaaactccggacatgccgcctttaagaactgaaacactcaccgtgagggtccgcagcttcattcttgaagtcagtgagaccaagaacccgccaattctggacacaaggagatcgagaccatcctggctaacacggtgaaaccccatctctactaaaaatacaaaaaatttattaggcgtgttggcggatgcctgtagtcccagctagtcccagctactcccagctacttgggaggctgaggcgggagaatggcatgaacctgggaggcggagcttgcagtgagccgagattgcgccactgccctcaagcctgggcgacagagcaagactccatctcaaaaaaacaaaacaaaaacaaacaaaaaaaccctctgtttcccgaatgctcagggagactgatttgagtaataataaaactcctggctggacacagtggctcacgcctgtaatttcagcaatttgggaggccaaggccggtggatcaccttaggttgggagtttgagaccagcgtgaccaacatggagaaaacactgtctctactaaaaatacaaaattagccaggtgtggtggcaagtgcctgtaatcccagctactcaggaggctgaggcaggagaatcacttaaaccctggaggcggaggttgcagtgagccgaggtggcaccattgtactccagcctgggcaaaaagagcaaaaccgtcaaaaaaaaaaaaaaaaaaaaaaaaaaaactccggtctcctgcacagctggctctgtgtgaattactctttattgcaattttgctgtcttgatgaatcggctatgtgtaggcagcgggcaaggtgaacccctttggcagttacagggggaagctaaggctcaggacactcgcagaaacctgaggaggctagaattttaccagattacaagccttaaaatcaaacctgaagttagtgccagcgaacaacacgcttaaaaataactaagatgttctttctggctgttctagaggtcaatatagaaaaatgatagtaactttgatgttattttatgttatgtatttctttttttcttttgagacggagtctgtctctgttgcccaggctggagtgcggtgacgcaatcttggctcactgcaacctccgcctcccgggttcaagatattcttctgcttcagccatccaagtagctgggattacaggtgtgtaccaccgtgcctggcagttatgtgtgtttccctacaatcaaacaatgatttattgtaaaaaaaaaaaaaatcaaaataaacaaaacctgaaaacttgtatgtgctcttttaatcaatctttttaaacaaacttttagaagagttaacattattaaaaactggaaagatcagacatggttttttcttactaagatatcactggctgttttgattctttcatcacgtacaagtttaggccctacacaatggttcatgcctgtaatcccagcactttgggaggccaagacaggtggatcacctaaggtcgggagtttgaggccagcctgaccaacatggcgaaaccccgtctctactaaacataccaaaaaaggccgggtgaggtgactcacacctgtaattccagcactttgggaggccaaagcaggcggatcatgaggtcaggagttcgacaccaacttggccaacatggtgaaaccctgtctctactagaaatacaaaaattagccgggtttggtggcaggtgcctgtagtcccagctacttgagaggctgaggcaggagaatcgcttgaacccaggaggtggaggttgtagtgggccgggatcatgccactgcactccagcctgggtgacagggcaagactctgtctggggaaaaaaaaaaaaattagctgggcgtggtgacacatgcctgtaatcccagctactcaggaggctgaggcaggagaattgcttgaacccaggaggaagaggttgcagtaagctgtgatcatgccactgcactccaccctggacaacagagcgagactctgtctcaaaaaaaaaaaaaaaaagtttaaggccaggcaaggtggctcatgtttgtaatcccacaattttgggagactgaagcaggaggattgcttgagggcaagagtttgagaccagcctgggtaacatagcaagactcccatttctacaaaaaatcaaaaaattagccaggcatgatggcatgtgcttgtagtcttagttacttgggaggctgagaggggaggatcacttgagctcaggagttcaaggctgcagtgagctatgggtgtaccactacactccagcctgggaaacaaagcaagacactgtctcaacaacaaaaaaagaccaagtatatttagtcattctataaaatttaagaagccagccaaaaacatttatgttcagcaatttgtttcagttatttcttcttacttggaaataatacacacatctaatgaataatagttaatttaatagaacataatagaagatttaaaattacatgaaaaatttatttataataaattatccattacatactttatttttaacagtttccctagattatttatgaaaactgagatattaggcaaggatagtcattatttcaagttacttccctgttaatcatttttatagcctgtgacaatcaggtattcacctaagtaagaagcttaaacatatgagtaatttcttgataactcaggagatacagttttttttttttttttttttgaggtggaatctcgctctgtctcctaggctggagtgcagtagtgtagtctcggctcactgcaacctctgcctccaggttcaagcgattctcctgcctcagccccccgagtagctgggactacaggctcctgccaccacacctggctaatttttgtatttttagtagagacggggtttcactatgttgtccaggctagtcttgaactcctgacctcaggtgatccacccacgtcggcctcccaaagtgctgcgattactaaaccaccatgcccggccgatatagatgtttttactaaatgaaaaatattaaattagtattacttatcaaaaattacacaggctgggcgtggtggctcagatctgtaatcgcaataatcacactttttctttttcttttttcttttttttttgagacggagtcttgccctgttgcccaggctggagggcaatggcacaatctcggctcactgcaacctccgcctcccaggttcaagtaattctcctgcatcagcctcccgagtggctgggattacaggcatgcaccaccacgcccggctattttttttttttttttttttatctttagacagagtttcaccatgttggctgggctggtctcaaactcctgacctcatgatccatccgcctcagcctctcaaagtgctgatattacaggcgtgagctactgtgcctagcaacactttttctttttctttttttttttttttttttttttttgagacggagtctcactctgtcacccaggctggagtgcagtggcatgatctcagctcactgcaacctccgcctcccaggttcaagcaattctcctgcctcagcctcccgagtagctaggattacaggtgtgtgccaccatgcctggctaatttttgtatttttagtagagatggggtttcactatgttggtctcaaactcctgacctggtgatccacccccttcagcctcccaaagtgctgggattacaggcatgagccaccatgccctgcgtcactttttcttttaattaatttaaaaaaatttgtttttagacagagtctcactctgttgcccaggctggagggcagtggcttgatctcagctcactgcaacctccacctcctgggttcaaatgattctcctgcctcagcctcctgagtagctgggattacaggtgcgcaccaccatgcctggctatttttttttttttttgagacggagtcttgctctgttgcccaggctggagtgcaatggcatgatctcggttcactacaacctctgccttccaggttcaggcgattctcctgcttcagcctcccaagtagctgggattacaggtgcccgtcaccatgcccagctaatttttgtatttttggtagagatggggttttgccatgttggtcaggctgctctccaactcctgacctcaggtgatctgcccgcctcggcctcccaaagtgctgggattacaggtgtgagccactgcgcccggccattttaatttaaatagagatggggtcttgctgtgttccccaggctggtctcaaactcctggcctggagcagacctcccacctcggtgtcctgaagttctgggattataggcataagccaccatacctagcctaatctaaacactttgggaggcaggaggattgcttgaagatagtagttcaagaccagcctgggcaacacagtgagactccatctctaccaaaaaaaaaaaaaaattagctgggcatggttccatgtgcctgtagtcctagctactcaagaggctgaggcagaggatcacttgagcccaggagttcgaggttacagtgagttatatcatgctacctggacagcagagcaagaccctgtctctaacaacaacaaaaaattatacaaacacagatcattttgtttaaaactggatttgtagtcttataacccttgtgtcagaccctgacaccttaaaacatctagtagagataaatataaaactgtctggccagtaaacccaagcaaaaatgtatgctgataattctgaagacatttctatttttattttaccaatactttttttctttgtcttttttttttttttttttttttttttaaagagagttttccttggtcacgccagctggagtgcagtggcatgatctcagctcactgcaacctctgcgtcctgggttcaaacaattctcctgcctcagcctcccaagtagctgggattacaggcacttgcctccacacccagctaccttttttgtatttttagtagagacaaggtttcctcatgttggccaggctgatctcaaactcctgacctcaggtgatccacccacctcacccttccaaagtgctgggattacaggtgtgagccaccaagcctagcctattttaccaatagttttaaaaccagcttatttattaaagattaaagatttacggcagggcacggtggctcatgcctgtaatcccagcactttgggaggccaaggtgggcggatcacgaggtcaggagatcgagatcatcctggctcatagtgaaactccatctctactaaaaaaaatacaaaaaagtagccaagtgtggtggcccacgtgtgcctgtaatcccagctactcgggaggctgaggcagaattgcttgagcctgggagacggaggttgctgtgagctgagatcatgccactgcacttcagcctggccgacagagcgagactctacctcaaaaaaaaaaaaaagaaagaaaaaaaatttttttttcagtttcggctgattgaggtggctggtgcctgtaaccccagcactttgggaggccggtgtgggaggattgcttaaacccatgagctcaagaccagactgggcaacaaagtgagacctcatctgtacaaaaaatgagaaaattacctgggcatagtggtgcatgcctgtagtcccagctcaggattcaactggggaggtcgaggcaggaaaactgcttgagctcaggaggttgagctgtgtttgtgccagtgcactccagcctgggcatgagagtgagactgtctcaaaaaactgttttttatcagtttcaaatgagtttagggttaaattttcaattgtttacattttagccaggattggctaaattgtataagaaatacaaaatatctaagtgccctggaactagtaacacgtctatgttttgtttgctgatctggtttgatttgcaaatgtgggcaggaaagaactttagcaggtgttttttttattttgtttttgtttttgccttttggcctctgtgtgacagaaaaagcaacatttttatgctggacagagataccttacattattgctctgagctcaaggtttcaacttctttgatctaagagagtctaacttttatagaccttttttttggtgttttattttattttattttatttgagacggagtcttgctctgttgcacagggtggagtgcagtggcgtgatcttggctcgctgcaagctccacttcccaggttcaagagattctcctgcttcagcctcctgagtaattgggacaacaggcacgtgccactgcgcctggctaattttttatatttttagtagagacggggtttcaccatattggccaggctggtctcgaactgtttttttttttttttttttttttttttttttttttttgagacggagtttcgctctgtcgcccaggctggagtgcagtggtgcgatctcgactcactgcaagctccgcctcccgggttcacgccattctcctgcctcagcctcccgcgtagctgggactacaggcgcgcaccaccatgcccggctaatttttgtatttttagtagagacggggtttcaccgtgttagccaggatggtctcgatctcctgacctcgtgatccacccatctcggcctcccaaagtgctgggattacaggtgtgagccaccgtgcccggccccggtctcgaactcttgacctcgtgatccgcccgcctcagcctcccaaagtgctgggattacaggcgtgaggcaccgcgcctggccttataaacatttgtctagttatttttctttcttcctttctcgctttctttcttcttttttttttttttttttttttttttttttttgagatggagtcttgctctgtcacccaggccagggtgcgttggcgtgatcttggctcactgcaacctccacctcctgggttcaagcaattctctcatctctgcctcctgagtagctgggactatagacatgcaccaccacacctggctaatttttgtatttttagtagtgacggggtttcgccatgttgggcaggctggtctccaactcctgacctcaagtgatccgcctgccttggcctcacaaagtgctggcattacaggcgtgagccaccacacctagcctttttctttagattattactttttcaattaagtgtttcatcactctaagcaattgttaggcaaacctaattttatgtttttaaaacatggctagctgtcacgcccgtaatcccagcactttgggaggtcaaggtgggcagatcatgaggtcaggagatcgagaccatcctggccaacatggtgaaaccccatctctactaaaactacaaaaattatctgggtgtggtggcaggtgcctgtaatcccagctactcgagaagctgagatatgagaatcgcttgaaccagggaggcggaggttgcagtgagccgagatcacaccactgcactacagcctggtggcagagcgagactctctttcaaaaaaaaaaaaaaaaagaaaaaaaaaagaaaaggactaactggtctgaatattgtgcacctgttagtactagctactccagagtctgaggcagcaggattgctgtagcccaggagtttgaggtcacagtgagctacaatcatgccactgtactccagcctgtgcaacatagcaagatactgtctttaaaaaaaaagttgtctaggttgttggttaccatggagttgtaatttgaaagccctttaagacttttgtttaatcttgacttgaatgccataagcagtaagtgttatctcaacaccaggggaaaagttagcagattcaaagcaggcagaaaaaaaaaaaggagagaaagagaacttagaagtctctccatgctaactctatagttgtaggttttatgaataatgaccatttgagctctgaattttccttgatgtaattttgctcatcagttttaaaatgtgcacaagaatgagccataatatgtagctggtggagtcctagaaatccttgcattggccaggtgtggtggcttaagcctgtaatcccagcactttgggaatccgaggcgggtggatcacctgaggtcaggagttcgagagtagcctggacaacgtggcgaagccctgtctttactaaaaatacaaaattagccgggtgtggtggtgcatgcctgttatcccagctactctgaaggctgaggcaggagaatcacttgaacctgggaggcggaggttgcggtgagccaaggtggcactattacactccagcctgggcaacaagagtgaaactctgtctcaaaaaaaaaaccaaaacaacaacaacaacaacaaaaaccagaaatcctggtacgccttcatgtttgagaatcccattccatttctttatcttgttttttttttttgagacagtgtcttgctctgtcgcccaggctggagtgcagtggtgcgatctcggcccactgcaacctctgcctccaggattcaagtgattcttctacctcagcatcacgagtagttgggattacaggtgcctgccaccatgcccagctaaattattttttttgttttggtattttttagtagagatggggtttcaccatgttggccaggctggtctcgagctcctggcctcatatgatccacctgcctcggcctcccaaagggctgggatcacaagtgtgagccaccacaccatccccattccatttcttattcatcacttgagagcaaagaccaccctatacatgctgtaatttatgggatattaggagtttagtctggtgttttagacagcaggaaccaccctagtggcttatgttagccatcctccacccactggttggaatgtttatttttgctcttgggagatttttagaaataagcaagagaaaagagtcaaaccaaatccaaagaaaccaagataagagtgttcacaaaaattttaatccaaactggccatgcagaccaaaggttgcagtgagccgagattgcatcattgcactccagcctgggcaaaaacagtaaaactccgttaaaaaaaaaaaaaaagagggaggctcagcctgagagaagactcagcagggcagaacaggcctgttgtggaagcagagagctcacagccttcagtgagtgctgcatgccagttctaagaatcatcgattcttgggaggctgaggcaggcagatcacctgaggttaggagtttgagaccagcctggccaatgtggtgaaaccctgtctctactaaaaacgcaaaaattagctggacatggtggcgggcgcctgtaatgccagctactcaggaggctgaggtaggagaattgcttgatcctgggagacggaggtggcagagagctgagatcgtaccactgcactccagcctgggtgacagagcgagactccatctcaaaaaaaaaaaaaaaaatcatcaattccttctaatagtgattttttcaggtaccatttctatatatagatataccatgtatatctacctaataacagagggtctttaaaagaaaatgatgtttatttgggaatagtgcaatgggaatacatatgctatagcaaacaatgtgtgtattcagggaggtaaaggaacaaagatcaacaacaatgccaggcacagtggctcacgcctgtaatcccagcactttgggcggctgtggtgggaggatcacttgaggccaggagtttgagaccagcctgggcaacatagtgagaccccatctttaaaaaaaaaaattttttttttaaattacctgagtgtggtggtgtgcacctatggtcccagctactcaggaggctgaactaggaggatcccttcagcccaggagtttgaggctacagtgagctataatcatgccattgtactccagcctgggtgacaacatgagaccccaaaaggagaaagagagtgagagaggaaggaaggaaggaaggaaggaaggaaggaaggaaggaaggaaggaaggaaggaagaaaagaaagaaagaaagaaagaaagaaagaaagaaaggcagagaaagaatattagctgggcatggtggcatgtacctgtagtcccacctactcaggaggctgaaatgggaggattgcttgagcccaggagttgaagaccagcctggacaacatagcaagaccctatctctacaatatatacatatttttttttttcctgagatggagtcttgcttgcccaggctggagtgcagtggcatgatctcggctcactgcaacctctgcctcccgggtttaagcaattctcctgcctcagtctcctgagtagctgggattacaggtgtgagccaccacgcccagctaatttttgtatttttagtagagaccgggtttcaccatgttggccaggctggtctcgaactcctgacctcatgatccccctgccttggcctcccaaaatgctgggattacaggcgtgagccacctcacctggcctttttttttgagatggagtctccctctgtccccaggctggagtacagtggtgcgatctcagctcactgcaacctctgcctcctgggttcaagtgattctcctgcctcagcctcccaaatagctgggattataggcccccccacgacgcccagctaatttttgtatttttagtagagacggggtttcaccatgttgtccaggatggtcctgatgtcttgacctcatgatccacctgccttggcctcccaaagtgtgagattacaagagtgagccactgcgcccagccaaaatattgttttaaattagccagatgtggtggcacacacctatattcccagctactttggaggctgaggtgggaggatcacttgagcctaggagtttgaggctgcagggagctatgatcgcaccagcgtactccagcctgggcaacagagaaagaccctgtctcaaaaaaaaaaccaaaatagttatgctccttggagttgtgtccttggcactcttggttcctgagtctatatggcgggtttttgtttgtttgtttgtttttgagatggagtctcactctgttgctgaggctggagtgcagtggctccgtgtcggctcactgaaacctccgtctcccgggttcaagcaattctcctgcctcagcctcccgagtagctgggattacaggcgcctaccaccacacccgattagtttttatatttttagtagagatggggtttcaccatgttagccaggctggtcttgaactcctgacctcaggtgatccacccaactcagccccccaaagtgctgggattacaggcgtgagccaccgcgcctggcctacgtggtggttttaaaacatgtttgcaaaatttttaacattcctcctattgaaaatagtaagtctaattcccctcctcttgaatattggctggccttagtgactgaatcctcacaagtagaatgcatcaggagtgtcacactatgacttccaaggctaggttgaaaatataaaaggggtaaagctctctttcctctgtcgctctatttctttctctttctctctatccccacccttttccctctcctccctctactcacctttggaacccagccgctatcgagcccaacacacacgcaggtgccctggttaaagtcctagctagggtcccaagtgacagccagcatcaactataacatgtaaaggagccagtcttcagatgattccagcctcagccttcaggccactcagctggtgccaaatagagtagggatgagctgtccccacagagacctgcccagtgcacattgtgagaaaggtaagtattgctctctgaggccattaagtttgggggtggtttatggcataaaaattggtaattggagcactcgacttcaagggttctcaccaggtgtgtgagggtgagggtggccctgcggagtgagtggcctgtgggggctggtcatatttcatccctaggctctcccgacctggctctgccagattcttacacggatgagggcctggactggggaggaggagggggagtgcagcagcagcaagggcatggaattggctgagaaattccacaggaggccaggtgcagtggcttacacctgtaattctagcactttgggaggccgaggcaggtggatctgaggtcaggagtttgagaccagcctggccaacatggccaaaccccgtttctactaaaaatacaaaaataattaggcatggtggtgggtgcctataatcccagctactcgggaggctgaggcaggagaactgcttgaacccggggggcggagattgcagtaaaccaagattgcaccactgaactccagcctgggtgaaagagaaactctgtctcataaaaaaaaaaaaaaaaaaagaggccgggcgtggtggctcatgtctgtaatcccagcactttgggaggccaagtcgggtagatcacttgaggtcaggagttcaagaccaggctggccaacatggtgaaacccccgtctctaataaaaatacaaaaattacccggatgtggtggtgctggcctgtaatcccagctgctctgtagactgaggcaggagaagcgcttgaacccgggaggcggaggttgcagtgagccgagatagcgccaccgcactccaggccagcggacagagccagactctgtctcaaaaattaaaaaaaaaaaaacaaaaagaaactaggaaactggcaggagctgtctccaggtcccaaaaggataaagtgaaaaacccggcaggccagcagatggccaaaaaagccatccctagctgccctcattgctcattagggtaagacactctcatcagcgccatgacagtttacaaatgccatggcaatgacccagagactattgccgtttccatacaatgacccagaaattaccacccctttcctagaaagttctgaataacttgcctcttgatttgcattaacccaccccttaatttgcatgtgattgagagtggatataaatacagttgccaccaacccacaagcctggttctggcaccctgcctatgagttagccttgctcagcaaggagcagctccagttcgataaaagattgctgaagattggccaggcgcagtgtctcacgcctgtaatcccagcactttgggaggccgaggcgggcgaatcacaaggtcaggggatcaagaccatcctggctaacatggtgaaactccatctctactaaaaatacaaaaaaaattagccaggcagggtggccggcgcctgtagtcccagctactcgggaggctgaggcaggagaatggcgtgaacccgggaggcagagcttgcagtgagccgagattgcaccactgcactccagcctgggtgacagagcgagactccatctcaaaaaaaaaaaaaaaaaaaacagattgctgaagatttcacccctgaattcttttctgggcaaagccaaggaccctcttgggctaagccccggttttagggcttgcttgcctgcccctgtatttattccagaaagttctgttggacattgttgatgggtaggaccttgggcactatccagagtgtggtcttagaatcagcatcatcaaggccaggcgcactggctcgcctgtaatcacaacactttgggaggccgggtggattacctgaggtcagaagttcgagaccagcctggccaatatgataaaaccccgtctttattaaaaatacaaaaaaattagccggacgtggtagcgggcacctgtaatcccagccatttgggaggctaaggcaggagaatcgcttgaacgtgggaaacagaggttgcagtgagctgagatggcaccattgcattctggcctgggcggcaagagcgaaactctgtgtcacacacacgtacacgaaaaaaggaatcagcagcatcaggatctcctaccccctgcccctggcaattacccatctgctttctgtccctgtggctgtatctattctagacgtttcacatgagtggaatcctgccctgtcatcctttgtgcctggctgggttccggtggcctgatgcttcatggttcacccatgcgactgcacggctccttgtccatggcatggatagactgcattttgtttattcattagttgatggatatgtgggttgtttccactttttcgctgttacaagtaatcctgctatgaaaattgatgtcccagtttttgtgtggacatatattttcagtttatcttgggtatatacccaggagtagaatgctgggtcatatggtaaatctatgtttaactttttgaggaactgtgggtggcccaatttacaactgctaagttcatccacttcttactttctccacggaactcacacttacagcagtgatagctttcacacctccctcgtccgcactgttaaacactaccacaaatcaggctactgggaaaagcctggaggccaccagcctcctgcaagaaaagcaccagcaggctgggcacagtggctcactcagtggctcatcccagcactttgggaggcggaggcacgcggatcacctgaggtcaggggtttgacatcagcctggccaacatggcaaaaccctgtctctactaaaaatacaaaaattagccgggcgggtggtgggcacctgtaatcccagctactcaggaggctgaggcaggagaatcgcttgaacctgggagatggaggttgcagtgagccaagatcacgtcactgcactccagcctgggtgacagagcaagactccctctctctaaaaaaaaaaggaaaaaggaaaagcaccaacacaggtgacgcaggtcctctaggagaccgtgtctggttctcttcctgccacacgcatgccactcatgccgctgaagccaaaacacctcctcctatgtgaccagaattctgggtcattttatgatttctttctttttttaaattaaaataaaaaaatttttttagacacacgatctccctatgttgcccaggctggtctcaaactcctgggctcaagcaatcatcctgcctcagcctcccaaagtgctgggattacaggcttaagccaccaaactagacctttttttgtttttattttttagggacaaggtcttgccctgctacccaaaccagagtgcagtggtacgatctcggctcactgcagccaaaacctcctaggcttaagtgatccttccacctcagcctcccaaagtgctgggattacaggcgtgagccaccacagtagacctcctttttgttttattttttagggacaaggtcttgctctgtcacccaggccagagtgcagtggcatgatctcaactcactgcagcctcaacctcctaggctcaagtgatcctcccacctcagcctcccaaagtgctgggattacagatgtgagccaccatgcttggccccatgagacatttaaatcttcaagaagagggtccagggcttcctgttgttcttcccatcaccctcgcccctctgcagggggtcctaacgcagctaacagttccagccttcttcaggggcttcttgctgtcagcacggaataaagtcagagctgagctcaggagagttccgtcactcgccaagactggccaggtctcttctgtccttggctgtcaagattccaaacttgagaagtgagaaaaacaatgggaatgagttagaaagttcccaagtgccacctttctgaaggaattccagggtggaacaagctgggttttgcagccagttagccctaagattaaatctgagcttctctgtttaatagctgtgagagtcttagcaactacttaatttgggtgggtctgaatttctatttttcactaattcccagcgtgaatggctgtcaggggggtaatagtttatttatttatttttatttaatttaattaattaatttatttttgagacagtctccctttgttgcccaggctggagtgcagtagtgcaatctcagctcactacaacctccgcctccttggttcaagcgattctcctacctcagcctcccaagtagctggaataacaggtgtgtgctaccacgcccggctaacttttgtatttttagtagagatggggtttcaccatgttggccaggctggtctcaaactcctgacctcaagtgatccgcctgccttggcctcctaaagtgctgggattacaggcgtgagtcattgcacccggcctggataatactagtttagataaaccacttcataaagtgggtatgcaatgctttgtttcctctcaccttgacccagcattgcttgtcatctctgaaagaccacaaagagacctgcccctccacttcagggacccacttgaaacctggtcaccatccaggcttgctctgccttggccatcaggttccctgggcaccaagcctctcttttctcccgctgcacctgccagcccgtctgacagcactggatcctgcaccctggagtccgtttggactcacctgccctgaccttacttggcttcctctgtgatgttgactttatcgaccgcttttgccagcctggtctgtcggccacaccctacccataaatcttctaccttggatctatacaactgcctcccttttgtcctgtccccagggtagtgagccctccagggcctgcagccccagctgtcctgatccttttctcctgaagcaaaggaagatgtgttcatagtgtacccactgctgatctttctcctctgtccaaacatctccagtcctgtgctactgccctggacataatcgtttattttgtttttttgttcttttttttttttttgacacagagtctcactcggtagctcaggctagagtgcagtggcatgatcttggctcactgcaacctccacttcccggattcatgtgattctcttgcctcagcctcccgagtagctggaattacaggcacgcaccacctcacctggctaatttttgtatttttagtacagacggagtttcaccatgttggccaggctggtctcaaactcctgacctttggtgatccacccaccttggcctcccaaagtgctgggattacaggcatgagccaccgtgcccggcctgccccggccatattagattctgagtcttctatgtccctgacaattggctaagcacattttaatatgtcttgtatttttttttttttttgagcagagtcttgctctattgtccaggctggagtgagtggtacagtagcggctcatagcaacctctgcctcccgggttcaagcgattctccctgcctcagcctcccgagtagctgggattacaggctcccgccaccatgcccgactaatttttgtatttttagtagatgcagggtttcactatgttggtcaggctagtcttgaactcctgacctcaggtgattcgcccgcctcggcctcccaaagtgctgggattacaagtgtgagccaccacgcctggccctaacctgatgtttttatcagcatctgtaagataagacttcaggaactggtagattctgcaggagtaacatggggtgcccatagagaaggggccctcttatgaccacagcatttaccataacctgtgtaatgggcatattcagtgggtgaatattcctgtcaccacaaacccagttgcacatgacttgtatacaaagcatatcagctgcttcaccaggggtgctccaattggcgtttataggggaagttgggcagttcccttctgagggtaaacatatgtttgttttttttgtttgtttttttttttttggagacagggtctcacattgtcacccaagctggagtacagtggtgcgatcacagctcactgcagcctcaacttcccaggctcaagcgatcttcccacctcagcctcctaagtagctgggactacaggggctcaccaccatgctcagctaatttttttatttcttgttgagatgggatttcatcatgttgcccaggctggtcttgaactcctaagctcaagtgatccacccacctcagcctcctaaaatgctaggattacaagcgtgagccactgtacctggccaacacacttagcagtggcttttatccactccaccaggctatgagcatgctggcccttcatgaatattcataggtcctcttataacctgttgaatacgtacaccttgtcaacccattcagcataaattcctgtctcatctttctctccctcaaaatgatctatgccagaggctacacttcccagcttgtcaagatggccaccctaccaccgcaacccctgataggaaataatgtctcctctccaaatttgtagatatctgtgtttgtttgtttgtttgtttttcctgagatggagtctcaactctgtcccccagactagagtgcagtggcaaaatcttggctcactgcaacctccgcctcccaggtgcaagccattctcctgcctcagcctcccgagtagctgggactacaggcatgcgccaccatgcgcagctaatttttgtatttttggtagagacagggtttcaccatgttggcaggctggtctcaaattcctgacctcaagtgatctgcctgccttggcctcctgaagtgctgggattacaggcatgagccaccatgcctggccagatctccagattttaagttgatgccttagaatatcacattgtcgtatgttctagacagtgatcactcttctgaggaggaaaactaataaagggaacaaagggcaaataaattaaacaaaggtcaaaaccaaagcattgcagttgcaaagcaattcagtaggagatgtggaaattgtgaagcagaaactccaaagttaaacaaagttaccatgtaaattacaccacaataaaaacaaacgaacaaacaaaaaacagaaagttaaaaccaggagcttcagttgtccaaatcaatggacataaaattcttcttccagtcttatgatgcatttgacaagatctccagtatctactcaagttaacccatgaaatatagctaatggtagatgagtaagataaaggctgtccagatctttatctgaaagaggccgaaaagaaagaccagagtatttcgtgaaaatctgaagggagaataaaaatttcacttactacctaccacgtgccaggcctgtaccagggggttgaaaaaaattggtgggtcttattatctccaatttacagatgaaaaaactgaagctccaggccgggcacagtggctcatgcccttaatcccagcactttgggaggccgaggcaggtggttcaccagattaggagttggagaccagcctggccaatatggtgaaacctcgtctctactaaaaatacaaaaattagccagatgtggtggcacttgcctgtagtcccagctactcgggaggctgaggcagaagaatagcttgaaccagggaggcgggggttgcagtaagccgagatcacgccactgccctccagcctgggcaacagagtgagactccatctcaaaaaaaaaacaaaaaacaaaaaaaaaactgaagctcagtgggttacatggtaggtaagggctggagccaggtgttaaacccatgtatctgttaaaattaaaacttaagacaaattaaatttaagagagtttaattgagcaaagaacaattcacaaatcaggcagctccctgaaccagcataggttcagagaaactctggggctgccatatggttggataataattatagacggaaaaaggaaagtgacatacagaaaatggagatgaggtacagaaatagccagattggttaaggtgtggcacttgccttatttgaacatggtttgaacagttggccacttgtgatgggccaaaactctgtggttggtataagagaaggttatagtctatttacatgtccagttaggccactaggtgaggagaaacctttaggcctaaattaaaatatgtaaggaggcagctttaggctaaacttaatttaacaattctcttggccatgcgcggtggctcatgcctgtaatctcagcactttggagggccaaggcaggcggatcacctgaggttaggagttcgagaccagcctggccaacatagtgaaaccccatctgtactaaaaatacaaaatttagctgggtattgtggcaggcgcctataatcccagctacttgggaggctgaggcacgagaatggattgaacccaggaggtggaggttgcagtgagccaagattgtgccgctgcactccatcctgggcgatagagctaagctcagtctcaaaaacacaaacgaaaacaaagaaaaccaattatctctttttggccaactttcaattttgagagattgataaaaagctttaggcattgatgtcactctgtcaccaccgtgaatggacttttttggtctaaaatcccactaggaaacatagcagtgggttttgtaaggtgggaataaggaaatagagcaataaggaaaaacctcgttattccaggttacttttttgggatgggttggagcagaggggagcttcttattatgctggaatttgttttcaggaggaaaaacctggtctgttttgggatctctctgctttctttgaagtttgagtttgattatgtagcatttagcatgggtgactccattttggtttggtcttttggggtctagttcaggagctcaggccagaaaaacagcctcccataactttacttaacatctctttataacattctgtccacaaatgcttggtacgtggctataggtttctggcttaaaaaatgattaacaatgtacccttacctaccctgaatctgagcccctgcagcctctctcatactactgtggccacccaagctgccctgaggtttcccaaccaaggtggctcacatccgtattcccagcacttgggaggctgacgtgggaggatcacttgagcccaggagttcaagaccagcctgagcaacacagtgagacttcatctctacaaaaagtaaaaatgcaaaaatttgctggggggtggtcccagattcttgggaggctgaggtggaaggatcaatagagcccaggaggttgaggctacagtgagctgtaatagtggcactgcactccagcctgaggtacagagtgagaccctgtctcaaaaaagaaaaaaataaataaaagtgaataagaaagcaaagaaaacccaatacaaaccctgcaagaagagagacagagaggtgaggaaagacaaaggaggaacggttcatagaagtctcgttgtagcctgggcccaaggtgctgtattcattggataaccatccacggatgcttactctgtaccaggtgtgatgccagatgctgggaatttggagatgactgagtcatggcccctgcctgagaatgagctctcagtttagtggagaaggcttacatgtaaacatataaattatagtgcagggtaattagaaccataatagagtaatgtaggaaacacacagaagccaaagaaaggaatgatgaattctatttgaagaggaggagctgggaggagaagagagctgaggccttcctgtgagaagggtgggtggtggtgcaggctggtggtggtcccctctgaataacctggaggttgccaggtgggcagaaggaggagagcattttaggcagctggagtgtgcatgggcagagttgaagattagcaattgcaggtcactgtgggcggagagcaggactccccttggcaacctggtgaagtcacttctgcccattactttattcattggaacaactaagagtgaacagaaaagcagcgctcatgccgtcagacccttcttccaaatgaaaacgtgcaccaaggcccagtgtataaataggaagcagataatgtttttttcttaacaggaaacagatctcccactgtttggaaatatattttgaaactttttttttttttttttgagacggagtttcactcttgtcacccaggctggagtacgatggcgcgatcttagctcactgcaaactccacctcctgggttcaagcgattctcctgcctcagcctcccaagtagctgggattataggtgcctgccaccatgtctggctaatttttgtatttttagtagagacagggtttcaccatgtttgccaggctggtctcaaactcttgacctcaggtgatctgccagcctcagcttcccaaagtgctgggattacaagcgtgagccaccgcaactggccaaaacatttttattattttattttatttatttatttatttgagacacggtcttactctgttgcccaggctggagtgcaatggcatgatcataactctctacagcctcaaactcctgggctcaagcaatcctccgacctcagtcctccaagtactgagactgcaggtgtgtaccactatgcccagctaatttttttttttttttgagatggagtctcgctctgtggcccaggctggagtgcaatggtgcgatctctgctcactgcagcctctgcctcccgggttcaagccattcttctgcctcatcctcccaagcagctgcagcagattacaggcatccaccaccatgcccggataatttttgtatttttagtagagacaaggtttcaccatgttggtcacgctggtctcgaacttctgacctcaaagatctgcctgccttgccctcccaaagtgctgggattataggtatgagccacagtgctcagccctcaaataatttttttaaattagttttttagtttttgtggggatgggtggggggggtcttgctatgatgaccaggctggtctcaaactcctggcctcaagctatcgtcctgccttggcctcccaaattgctaggattacaggcatgagccacaggtgtcggaaaccttctggatgggggtggagaggcagatccccaccacaggtctgaaattgcatcaaaactttgaaaagagggcaaagctgcttcacctgagagagggaggagctttcaggggaattctagatgggaggggagaaggtcacaccacatctgccatgcctgtctccactcttaccctgcccaagtccctcctccactttatcaaaatcaggagagagcaatccttctaaaatgcaaatatgagcatgtacccctctgttcaaaacccttccatgtctcccctcactgtgagaaaagaagccaaactcctccaggccgggcgcggtggctcacacacctgtaatcccagcactttgggaggccgaggcaggcggatcacgaggtcaggagttcgagaccatcctgccaacatggcgaaaccccgtctctactaaaaatacaaaaattagctgtgcgtggtggcgcatgcctgtaatctcacctacttgggaggctgtggcaggagaatcgcttgaaccagggagtcagaggttgcagtgagctgagattgcatcactgcactccagcctggtgacagagtgagactccatctccaaaaaaaaaaaaaagccaaactcctgaccacacctctcaggctctgcacactctgcccactggctgctgcccaggcctcacaggtcggcttccctcatttccctccagccaccctcctctcttcattatttccaaattcatcacactttcagcttgttatctatggcagataacctcattatggcagaaaataagactgaagcatgtgaccaaacatagacagactttttcacaagatagtcagtctcttgggcttattcaaattccaaagagaatcatttacaagttaattcctatctttcgggtccattcatttctccttttaaaatattttttttttgtttatttatttatttattttgagacggagtctcgctctgtcacccaggctggagtgcaatggcatgatcataactctctgcagcctcaaaatcctaggctcaagcaatcctctgacctcagtcctccaagcactgagactgcaggtgtgcaccactatgcccagctaattttttttttttttttgagacggagtctcgctctgtggcccaggctggactgcaatggtgtgatctctgctcactgcagcctctgcctcccgggttcaagcgattcttctgcctcagcctcccgagtagctgggattacaggcacccgctaccgtgcccagctaatttttttgtgtgtgtttttagtagagatggggtttcaccattagccaggatggccttgatctcctgacctcatgatccgcccgcctcggcctcccaaagtgctgggattacaggcgtgagccactgcgcccggctatttttttgaaacggagttctgcttttgttgcccaggctggagtgcaatggtgcaatctcggctcactgcaacctccacttccctggttcaagcgattctcctgcctcagcctcccaagtagctgggattacatgcatgtgccacaacacctggctgatttttgtattttttagtagagacggggtttcaccatgttggtcaggctgatctcaaactcctgacctcaagtgatccatccgcctcgggctcccaaagtgctgggattacaggtgtgtgagccactgcacctggccccattcatttccccacaaaatcacatactacctctcaacattgctgcacccccatttcccctcccctgtgaagaaggcagctacataagcatctggaccacgttgggttattaggtcatcgttctcctgtggtttccttatgcttgtacatgtgacataaattttgtacacatttttctcctattaatttgccaattgtcagttcctttttggggagcctttatagggctagagagcagaaaggaagctttcccttggccctacagctccttgaggtcggctgttgactcttttcttcattgctgtctcttcagcgtctagaatggtacctccaatgtagagatgcttgataaacgtgttgagccgggcacagtggctcacgcctgtaatcctagcactttgggaggctgagggtggatcaagaggtcagagttagaaacaagtctggccaacatggtgaaaccctgtctctactaaaaatacaaaaattagcaaggcgtggtggtggatgtctgtaatcccagctacttgggaggctgaggcaggagaatcgcctgaacccgggaggtggaagttgcagtgagccaagaaagggcagcagagcaagaccccatcttgaaaaaaaaaaaaaaaacaagcaaacaaaaaacaaaaacaaacaaaaaaacatgtgttgagttgctttctgtttagtagcagaaagctctggaagggctttggacattcacgcgtgcaggcccgggaacgggatgaggtttaaggcaacttcatctagagtttaaaaggggcaggtaggcccacagctggcacgtgggttaaatgtaaagtggctcaaacaggatctgataaggcagaagcagagatgggggcctggtgtctcactgccttcacgttcttccttctgcctcagtccccacatgagagtgcaccctagaggtgccagcattagcgatagggcagctttccttgtttctgggatggacagaaaatgggccttgagacccctcccatcataggaaagcatctcttgcactctggagactgaggacttgctatagtggaacaagaagcagtcttcggcaatggaggagatgctggatctccatacaggcagggtgggtgcaacggagtggagctgtggcaaatgtgggtgcctctgtcctgagggtcctggatgtgtcatgcctgggaacatgagggcgttcttccaaggtgcccatctcgacctctctgagctgccatctttgacttcctgtgtttggtcacagactaggggtggtctgtccctaaacagaagaagacaagcaaggattagagaggagaaagagctagagagagagcttgggagagatgtagggacaaggaaagaagaggcagaaggaaaaaggcatggagggaaggaatataaaaaaaaaccccttaggccaggcatggtggctcacgcctgtaattcccgcactttgggaggccaaggtgggtggatcacctgaggtcatttcaagaccagcctggccaacatggtgaaaccccatctttactaaaaatacaaaaattagccaggcatggtggtgggtgcctgtaattctagctactccggaggctgaagcaggagaatcgcttgaaccctggaggcagaggttgcagtaagctgagatcaggccactgcactccagcctgggtgacagagcgagaatctatctcaaaaaaaaaaagaaaaaagaaaaaaaggccgggtgtggtggctcacgcctataatcctagcactttggggggctgaggaaggtggatcacaaggtcaggagattgagaccatcctggccaacatggtgaaaccccatctctagtaaaatagaaaaaattatctgggtgtggtggtgcgcacctgtagtcccagctactcaggaggctgaggcaggggaattgcttgaaccctggaggcagaggttgaagtgagtcgagatcgcgccactgcactccagcctggcaacagagcaagactccatctaaaaaaaaagaaagaaagaaagaaagaaaaatcctccccagagcagggaaagatgaagacataaagggaaggagagtcaccaggaaagagagagggagagagacacaaaacaaaatggctggaatgaggtgaaagttatagtagcaggatgtgctgacactgaccttggagaaaaagagaggggaagggaggagtgaacgtggaatctttggctgctgttctgtttcactcccagaactcaccaccctggattccccccatttccagatcctcaggcgggactgcctttgctatctgggatgagtcattggccccagatggtaaacctgtgaggggtggggtgctctgaatgcctgactagtcatttataattgagagcacttattccagccccttctggtcctccatccttccctcttcttggacctcctgattcagagaggtcagagggccagtccaggaggggtcaggcactaggtccctggagtcagtcttagggattttaggcagagaggaatcagtcctgaaaatgaagggcatacagagaaaaaaaaaactatgacatcacccctgggggtgttacagacctaagaaagaagcaatggccctgggcggcctacagccccaggaagattcagccatggtacccaggagacttgagggcccaaagcccagaattacccccagaggaacacctgtagaccttcggatccttagctttgcacttcccattggactgactctgtttcctgtggggcaataggcacgtgttcactgtgcacctgcagccccagtcatccttctcagagagaaatggtttgggaagtgtttggcatattggggataaatagatgagtggatagaaaaaaaaatgcaggccaggcacagtggctcacgcctgtaatcccagcactttgggaggccgaggtgggcggatcacgaggtcaagagatcgagaccatcctggcaaacatggcgaaaccctgtctctactaaaattacaaaaattagctgggcgtggtggcgcatgcctgtaatcccagctactcgggaggctgaggcaggagaatcgcttgaacctgggaagcagagattatagtgagccgagatcgcgccactgccctccagcctgagggatagagcaagactgtgtctccaaaaagaagaaagaaaaaaaagcaattacagcaaaatattaaccatagtagaatctatacagtggttatataagtgtccactatacaattctttttttttttttcctttttttgagacttgatgtttcgatcatggctcactgcaactttgacctcctcagctcaagtgatcctcttgcctcagcctcctgactagctgggatcacaggtgtgcaccaccatgcctggctaattgttttattttttgtagagacgagatctccctatgttgcccatgttggtcctgaactcctgagcttaagcagtcctcctgctttgacctctcaaagtgccgggattacaggcatgagccactgcacccagtcttgctatacgattcttttgttttttttttttttttttttgagatggagtctcactctgtcgcccaggctagagtgcagtggagtgatctcagctcactgcaacctctgcccctcaggttcaagtgattctcctgcctcagtctcctgactagctgggatcacaggcacctgccatcacacccagctactttttgtatttttagtacagatggggtttcgccatgttggccaagctggtctcaaactcctgacctcaggtgatccagctgcctcagcttcccaaagtgttggattatgggtgtgagccactgggcccagccactgtacaattctttaaacttttatatgtgtttggatttttcataatattagaaaagggaaagaaaaaaatgtctggcaaatagtcagcactcgtaagtataagattttgggaatatattcccttctgggagaatccacatttcgaatgcctgggaagggctctgtttgtcctgacagatggcagatttcaggtgagagcacctactaagcctagaggtgataagctactttgcccacctagagctgctggtggtgaccttaagtttactatgtttctcctggtatacggcacttggcccagagtggactccagcttgccacctgtcacccaggctggagtgcagtggcgtgatcttgtctcactgcagcctcaacgtcctgggctcaggcgatcttccctacctccctcctgattagttgaggctacaggtgctcgtcaccatgcccggctaatttttgtttttgttttttgttttggtagagatggggtctcacactcttgcccaggctgagctagaactcctggcctcaagcgatctgcctctgcctcccaaagcattgtaatgacaggtgtgagtcaccatgcccagccaggaactcagagaatcttaccctatgctgtagtatctgttgactatggggtagaggcaggataaggtgttccagaccctgcctgacacctgatccgaagaggttgctcatgtttgctcaggaggtgaggttcacacaataaagggcaggaggagggcttggacctggtataaaacatctggaagtttccagggggctgctttgcatctgaaactgtcaggtgaggggtgacagagatgcctgaatctgagttgggggggaattcaaatctgagctggcgaagaggatgcctggaaggaatggcaggaaagacttgagttaattggcgcttctgggtctgcagtaatcttaggtgcaaagctgtctaggtctctgctgaaggactggggacacctgggatgttcaggagaatagaaatggccagatgtgtgttagtggagaaaagaatagtgacacatagaccaggcacctggggtctaatatcttgagctggtcccgactccttctgcaacttctctgtctgtcctagttccaccagcactgcttggatactggtgctggcacagttccttctgtcaccaactttgctccccaggtaacatagaggcaactctaaaatgcttctttccttgagaccaggtggatgccagggatttaaaccatgctccaggtgccccataatccaggccaattcaccacagatgatgaggctttctttgctcagcctctgggctcagtaaactcagccatctctttgcttgggagaggtcctctactccctccttagaaaactcgtttcctggctatggccataccaacccaaatgtacctgggcttggctgacttcagaaaacttttctgctttgtgccaggatggaataaggcttaatccagatagttagagttcatcttcaggcctgagagaaaaagaggagggcttggctacagccagaccagggagagctggaggggtcagggacattgaaggtagcatcagagaggaacaggactacaggctatggacagtcctttctaagctcaagactgggtctgctaggtctaagttgaaggacgaagaaggcttggtctgagctgcaggtcaggagtgcctgggtcaatcaagtcaacaaggaagaaggtgaatcttcatttgctcttttcttcccactccagccccagaatgttgacagtcgctctcctagcccttctctgtgcctcagcctctggcaatgccagtaagtgagataccaggagcctggtattggggacttgggaaggcagccttgggcactgctgttggccaaggcttttggaggttggcttggggtggggagctgagttgtcggaggaacaggggtgatgcagagaaactgaactcctggaagatttctccctccaactcctgcttgcccctccagttcaggccaggtcttcctcctatagtggagagtatggaggtggtggtggaaagcgattctctcattctggcaaccagttggacggccccatcaccgccctccgggtccgagtcaacacatactacatcgtagggtaagattctttgaattcctggctgggcgcggtggctcacatctgtcattacaatgctttgggaggcagaggcagatcgcttgaggccaggagttctagctcagcctgggcaagatgccagggatgccagggatttaaaccatgctccaggtaccaagaccccatctctaccgaagaaaaacaaaaaaattagccaggcatggtggtgagtacctgtagcctcaactactcaggagggagaggcgggaggattgcctgagcccaggatgttgaggctgcagtgagccaagatcatgccactgcactccagcctgggtgacagagtctctttgttggcaaaatgagttgaagttccctgtaggatcttccagggttcacccaggcttcacagtctgtaggactagccagagacctctcatccctatcatcacctttctttctccttccttcctcccctcttcctcagtcttcaggtgcgctatggcaaggtgtggagcgactatgtgggtggtcgcaacggagacctggaggagatctttctgcaccctggggaatcagtgatccaggtttctgggaagtacaagtggtacctgaagaagctgttatttgtgacagacaagggccgctatctgtcttttgggaaagacagtggcacaagtttcaatgccgtccccttgcaccccaacaccgtgctccgcttcatcagtggccggtctggttctctcatcgatgccattggcctgcactgggatgtttaccccagtagctgcagcagatgctgagcctcctctccttggcaggggcactgtgatgaggagtaagaactcccttatcactaacccccatccaaatggctcaataaaaaaaatatggttaaggctagtctgtgtgggggcatctgtggctgggatatctgcctcctgacttagccggggacgtgcaaatctcacttctggctggctttggacatctgtctggaagatgggaagatgagggagaggtatgtaagaatcctgggctttgtgctataatttatcaagaggagatgagattctggcttgcatcaacgctcttcaaggacagctccttggaacattgatccaaactggagtcatgggtctgagggcaaggcctagttgtggcttacaccaaaaccccagatgtcccactctccagctctcctcacccctggtcctccccttgagaaagtggtgaactcacttgctgtgtgtgggtggccaggaccattagcctttgttctttcccagaacccacctgactcctgaaacttagctgaagtctgtgcccgaggaccctgccctgttaccaggcccagttcctcctcacctctacccatgagccccggtgtcctgctaagccctctcagatctgggattcctccttcctcaggaagccaccaccttctcagcagtggaaaccctgcccacactatgctcttaggctttagccatcagaaggttacagtggactgcgggaggctgacactaggctgaactcattaaggaatgaatgggaggtgagaagacacaggcagcaagaatcgagtgtttcaagaagtttggctgtggtttgccagaaataggcaagtcagttttcgggggtgtaaggaaaaagggttttgtgtctttttaaaatcctagacaggagagtcacaagcatgttcacatgataaagaggaagaaagagaaagaggctggagattctgaaaagagatcactggtgaggtctcaaaagagatagaagaggatggttatgtagttggggaaagaaattttaagaagggaagaaaattaaaatgagtgaaggtatacgttagttttgtaaaagttatcaatatctggctgggcacagtgctcacacctgtaatcccagcactttgggaggccaaggcaggcagatcatttgaggtcaggagttggagacaagcctccaacatggtaaaaccctgtctctactaaaaatacaaaaattagccaggtgtggtggcagtcacctgtaatcccagctacttgggaggctgaggcatgagaatcacttgaatgctggaggcagaggttacaatgagttgagacagcacaactgcaccccagcctggatgacagagtgagactccatctaaaaaaaaaaggaatgttatcagtatcaaaatggagtaacatatgtcacatcctaacaaaatggaaccaacctgacacctaaattaagcattgcacctgataacaccatggaggactgggtggagaatcagcagacaatggcagggagaggcagtctgtggaccaagttcaggtgaaaggatcacccatcatgttgggcatcagatcaggcaggttcacacactacctgaggaagctggtctttgtgacagacaagagctgctctgcctcttgggaaacacaggcaccagttttagtgccatcttcttgcacccaaatgctgtcctttaactcatcagttacagtgctggatccctcatcactgccaatacggggctagcaatatgtctgccccagtgaatgcagccgccacggagccccagcctcctctatggcaggggccctgtggtggggaatgaggacttctctatcattaacctccatgcagttggctcaagaaaaggatatggtagttgggcaagggggctcacacctgtaatcccagcacacttgtaatcccaggagggtcgcttgagcccaggagtttaaggccagcccgggcaacatagcaacctgtttgtaggcaaaatgaggagttgaagttccccgtaggatcttctagggctcaaccagccttcatgtgcagtgggactggcaagaaatctgtcatccctgttaccactttgaaggtctcagtgtgtatgcaggtcctgaaaagttcaagtcccacctgaaacgcaacacagcatcatgctctgattcatcagtgattccctaatcaatgccattggcttgcattgggactatctatcccagcctatccagtgacttcagcagctgcagagccccagcctcttctttggcaggggcactgtggtgaggaggaaggattcccttatcacaaatctccatccaattggttctataaacagatatggtggcccaactgttgcgggaagtcagggaccccgaacggagggactggctggagccacagctgaggaacataaattgtgaagatttcatggacatttaccagttcccaaaattaatacttttatactttcttatgcctgtctttactgcaatcactaaacataaattgtgaagatttcatgaacatttatcagttcccaaataatactcttataatttcttatgcctgtctttattttaatctcaatcctgttatcttcataagctgagaatgtacgtcacctcaggaccctgtgatgattgcattaactaacaaattgattgtaaaacatgtgtgtttgaacaatatgaaatctgattgtaaatgtgcatttgaacaatatgaaatcagtgcaccttaaaaaagaacagaataacagtgattttagggaacaagtgcagaggttacaatgagttgagatagtgcgactgcactccagcctggatgacagagcgagatttcatctaaaaaaaaaaaaaaaagaatgttatcagtatcaaaatggagtcacatatgtcatatcctaacaaaatggaacaaaaagggaagataaccataaggtctgactgcctgcggggtcgggcaaaaagagccatatttttcttcttgcagagagcctataaatggacgtgcgagtaggagagatatcgctaaattcttttcctagcaaggaatattaaatattaagaccctaggaaaagaattgcattccttggaggaggtttacaaatggccactctgggagtgtctgtcttatgctgttgagataaggactgaaatatgacccggtctcctgcagtaccctcaggcttactaggattgggaaattccaacctggtaaattttggtcagaccggttctctgctctcgaaccctgtcttctgttaagatgtttatcaagacaatacatgcacagctgaacataggccctcatcagtaattctaattttgccctttgtcttgtgatctttgctttgccctttgccttgtgatctttactggcctcagaagcatgtgatctctgtgacctactccctgttcgtacaccccctccccttttgaaatccttaataaaaacttgctggttttgcggctcaggtggggcattatggacctaccgatatgtgatgtcaccccccaccagcccagctgtaaaattcctatctttgtactctttctttttatttctcagaccggccaacacttagggaaaatagaaagaacctacgctgaaatattgggggctggttcttctgatacccaacaccatggctcacagctgtaattccaacacttccagaggccaaggcaggaggatcacttgaaccttggagtttgaggttgccatgagctatgattgtaccagtgcactccgacctgggtgacacagtgagaccttgtctctaataagaagaaaaaaatgccattttaaaagtgtacactttcatggtttttagtatattcactgtattgtacaaccattaccactacctcattccagaacacttccaccacccccaaaagaaagcagttacatctgttcactgtagtgccaattactcaaccccttgtcatcccctggcaaccaccactcaggtgtactttctatgtctgtgggtttgctattgtaatttgaaagttcactgatgttactttaatttggtttcattttgaatacagtaaatatggatcaaaacccatatatacggagcatctttagaggcctcatttttgtttttttttttttttttgagatggagtcttgcactgttgcccaggctggagtgcagtggcgtgatctcggctcactgcaacatccacctcccagattcaagcgattctcctgccccagcctccccagtagctgggaatacaggcgcctgccaccacaccctgctaatttttttatttttagtagagaggggttttcactatgttggccaggctggtcttgaacgcctgacctcgtgatgcacctgcctcggcctcccaaagtgctgggattacaggcgtgagccaccacgcccaggctagaggcctcattttttaagactaatgggatcccaaggctaaacgtttgagaaacactgatctaagatttgtgttttgttttgttttgttgttcaatcaagtggaacataatgtctaaaccagggccttacctacctggaactcaaaggtggaatgaccttccctggccaagcttccagaagggacagggagctacttaacagactgctggacccttaacgactggaaaccggaaccgtgggtgacggaaccgaccagacgtgacagccctttggctggggctgcagtcccacgatccacacaacgactctggctccgcagacgcgccaaccacccacggaggcaagaaactgccgagagtgaagggaaagggagcccagtgctgggcggcactcagcagctcccccagcggccactgtcgccaacgtctccgcgtcggggtttgtaccgcagctcgcgtccagtcgtcaatggctgcgaggcccatgcgcgctccagcgtcctgaccaggggaacgttttccttagggacccggaggcgagcgctggagggagggatggttgctaacgcaactctctgcagggcagacccaccagcacccgcacgcaaactacgggctggagcagtctaacagaaactctctcaaagtcgctcacgggttgccattctaggtaagatttgtgaataaaactaattctttaaaagcctgagtttttctttagttgacagttttaattaacatactcttttctttcctcttctgcagacccagcctcaccattccaatgaagacatcaattaacccatgcacagccgctacaaacggggagctcattgcctgcagggaaggaccctctacagagagctacctgggggctgggaagcaggaccccaggctgagtcctgccttttggtagtgccccgccccggccaatgcggctgttatatcaaagtacataaaagtgaaggcaaagggtgtccacgtgggatagactggcatagcttcctggccacccatggtgctccattatctcttcgaggaccccttctccacgagaccctccaggtctggtcctctatcgtccagcccccattctcttctccatcactgctgctgtgtcccagatgaccttaatttaatcttcacatatttgaaggacagaatcatcggcctcacccactaattattattattattattttattttattattattattttttgagacggagtctcgttctgtcacccaggctggagtgcatcactgcaagctccgcctcccaggttcacgccattctcctgtctcagcctcccgagtagctgggactacaggcgtccgccaccacgcctggctaatttgttgtatttttagtagagacggggtttcaccgtgttagccaggatggtctcgatctcctgacctcgtgatctgcccgcctcggcctcccaaagtgctgggattacaggcatgagccaccgcgccaggcctagacccactaattatcttttatggcacaaactctatgttttacttttgcccaggctggaatacaatagcggcatgatctccgctcaccacaacctagcctcctgggctcaagtgatcctcccacctcaacttcccaagtagctgggagtacaggcatgcgccaccacacttggctaattttaaaatgttttgtagagaagggtctcactaggttgcccagactggtcttggactcctagacccaagctatcctcccaccttagcctcccaaagtgctgggattacaggaatgagccactacatctgacctcctttgcttcttttaaagacatagtttggaatttttttttttttttttttttttgagacagagtctcactctgtcgcccaggctggagtgcagtggcgccatctcggctcactgcaagctccgcctcctgggttcacgccatccttctgcctcagcctcccgagtagctgggactacaggcgcccgccccacacctggctaattttttgtatttttagtagagacggggtttcaccgtgttagccaggatggtctcaatctcctgaccttgtgatccgcccatctcggcctcctaaagtgctgggattacaggcgtgagccatcgtgagcagcctttttttgaggagtctccaactgtcacccaggctggagtgcagtggtgccatctcggctcactgcaagctctgcctcccgagttaacgccattctcctgcctcagccttccgagtagctggaactacaggcacccgccaccacgcccagctagttttttgtatttttagtagagacggggtttcaccgtgttagtcaggatggcctcgatctcctgacctcatgatctgcctgcctcagcctcccaaagtgctgagattacaggcgtgagccactgcacccggcctggaagttattttttaaaaatcaattgtttctttctctgtcatcccagcaggagtgcacaggcatgacctcagctcactgcaacctccacttcctgggttcaagcgatcctcctgcctcagtctcccaagtagctgggactataggcacatgccaccacatctggctaattttttttctttcagatggagtcttgctctgtccctcaggctggagtgcagtggtgcaatctcagctcactgcaacctccaactcctgtgttcaagtgattctcctgcctcagcctcctgaatagctgggattacaggtgtgtgccaccacgccggggtaatttttgtgtctttagtagagacagggtttccccatgttggccaggctagtgtcaaactcctgacttcaggtgatctgcccgcctcagcctcccaaagtgttgagattacaggcatgagccaccacgcctggccaaaccaccctaatttctaccagccagatgcagatccttaaaacaaccctaggaggtatttcaaccattattcccttttaatatctgaggaaatggaggcacaaagaggctaaatctctggtctgggcagcctggcaccaaggccctgtacctaaatggtttattcaaacatagaagccctatctccttgatctatgctcttttcactatttctggcaggtttcttaccaaatatctggagttgacaacaaatgtgaaaactgaacagccttttctgacaggcaaggaagaccaaactgccaattgccaatgtcagatgttctcaaagtatggtccagagacttctgggagtccctgagacactttcagtgggtctacaagttcaaaactattttcataataaaactaagataccaattgacttctcttgcattgtttctcaagtatatagtggagtattcaaaatactatattatatgtgacatcacaacagcatgaatgcagaagcagatatgagaatctagtttttttgtgtgtctttgagacaaggtctccctctgtcactgaagccagagtgcagtggcaccatcacggctcactgcagcctcaaactcctgggcttaagcaatcctcccacctcagcctcccaagtagctgggaatataggtgtgtgccaccatgcctggctaattttattttttaagagatggaggtaggccaggcacagtggctcacgcctgtaatcccagcactttgggaggccgaggcgggtggatcacgaggtcaggatatcaagaccatcctggctaacacggtgaaaccccgtctctactaaaaatacaaaaaattagccgggcgtggtggcaggtgcctgtagtcccagctactcgggaggctgaggcagaagagtggcgtgaacccgggaggtggagcttgcagtgagccgagatggcgccactgcactccggcctgggccacagagcgagactccgtctcaaaaaaaaaaagagatggaggtctaggcagggcttggtagctcacgtctgtaatcccagcactttgggaggccgaggcggatggatcacctgaggtcatgagttcaagaccagcctgaccaacatggagaaaccccgtctctactaaaaacacaaaatcagccatgcacggtggtgcatgcctgtaatcccagctactcgggaggctgaggcaggagaattgcttgaacccaggaggcggaggttacggtgagctgagattgcgccactgcactccagcctgagcaacagagagagactatgtctcaaaaaaaaaaagtgcacacctctctggtttttagtatgtttattacgttacgcagccatcatcactacttcattccaaaatatttaatatttccatcacccccaaaagaaactcgttatatctattgctgtagtgccagctcctcagcccctcaccatcccctggcaaccactacttagatgtcctttttatgtctatgggttttttactgtaatttttaaattcattaatgtcaactttaatttagtttcacttcacacacagtatatacggccaggcctggtggttcacacctgtaatcccagcactttgggaggccaaggcgggtggatcacttgaggtcaggagtttgagaccagcctggccaacatggtgaaaccctgtctccataaaaatacaaaaattagctgagcgtggtggtgcacacctgtaatcccagctactcgggaggctgaggcaggagaatcacttgaacccaagaggcagaggttggagtgaaccgagattgagccactgcactctagcctgggagatggaagtgaaaccccgtctcaaaaacaaaaaaacaaaaaccctcatatacacaaaacatctttggaggcctcatttttaaaaactgtagtgggatcccaaggcaaaacgtttcagaaacactgatctaagatttgtgttttttgttttgagacggagtctcactctggcgccgtggctggagtgcggtggcaccatctcggctcattgcaacctacacctcccgggttcaagcgattctcctgcctcagcctcccgagtagctaggactacaggcgtgccaccatccccggctaatttttgtgtttttagtagagacggggtttcgccatgttggccaggctggtctcgagctcctcacctcaggtgagcctcccgcctcagcctcccaaagtgctgggattacaggactgagccaccgcgcccggcccgtgttttgttttgttgttcaacagggtggaacataatgtctaaacctgggccctacctacctggtgctcaaaagtggaatgaccgtccctagccaacccttcagaaaggacagagagctactcaacggactgctgtactcttaaggactgggaaccggaaccgtgggtgagtgggactgaatcacagactaagcgttttccacgcttcgccgacgtgctgagtgccaagttataaagacaggaacatccaagctgctctcctgggctgacacggacgcgaggggacctacagtggccttgggcccagcaggcagcgactgcaacgtgactgcccagagtccagcccctggggcccagatctacagaaccgaccagacgtgatagccctttggctggggctgcagtcccacgatccacacaacgaccctggctccgcagacgcgccaaccacccacggaggcaagaaactgcagaaagtaaagggaaagggagcccagtgccgggcggcgctgagcagctcccccagcggccaccgtcgccaacatccctgcgtaggggtttgtatcgcagcgcgcttccagacatcaacggctgcgcggcccacgcgcgcgcatgcgtcctgaccaggggaaccttttcttggggacccggaggcgagcgctggaaggcgggatagtggcgacccacacgcagcagcttccggcggcgcgtagtcttgattggtggaacctgggagagggggcggggcaccggggaattcgaatgggagaggcgggcccaaggagggagtggaatggccgcgggcggctcgacgcagcagaggcgacgcgagatggcggcagcttcagcggcggcgatctcaggtacttgagcccggcctgggcaaggcgggtaccgacgtctggagtttagtgggagttatgtgtcggagtgtggtccaggctctgcgggttgtcgcggagaggcggccatggcgcaggggcggggagagggggacggtgagagtgtggggtcgcgagccggtcgccccgcctggctcctgccttctccctgtttcctgctctccccttgggtcagtagactcgggtctccggtccaggctcttggcttgaaccccgcgcactttttctttgtgagcttcggtttcttcgtctgtgaaacgggggtcatggcctcatccctggagatcacctgaataagcaagagaagagtggcggacgctctagccacgaggacgagaagaagggagccggaggcgtgtattgggaagggttctgtgtgggacatggtgtttgggtgcagagacatccctgagagatgcaagaggacgggctgaggaacagacccggctgctgctgggtttgagttggcagcgtaagatgctctgcgattacaggaaaacgaaataaaagactaaaatttcctttcactctagcatggaagtgaatgctattttagggttggaaaggctgttaggacacccaaaatcttgtatgtgagtatttgtttacatgtgcctctctaacccggagacttaatcctcgttagtgatgatggtgagcgccatagtaattcactggagccctcgttagcctcgtggggaaacagacatttaggagaatgcctaacacatgtagagctcttgctatgtgccaggcacagttgtaggcattttatggtggtgaaccatttattgtccacacaatgctatcaggttgttactattactgtctttgttttacacaggaaactgaggttagtttgttcagagttaacacaactagtaaatattggggcttgaattcgctctcaaggagtctgagtgtagaacctctgctcttaaccattatgcccaagtacatgttatccctgctggctgagcacagtctccccttacccttcgaagatgcactgtgtccggtgcatggtagatatgaaaatgcctgaatgaataatgtcccttcctcgaggaatttacagtctgtttcaatagagtgtcacatacgtagatgtaatacgaaacacaatgagagatgtgtataaactgagggtgtggaatctgaagtaagcccttgagtattctgggaggacttcattaagggagtgaatgatacttgagatgggtttcaaaggttggataggagtttgccaggccttgactaagaagacaagaacagcaagtgttttcttatttatgatgtaagatgctctcttagctcaatttcctcatcaataaaagggagaagagtgaatgaaatttaggaattgtgaaagaagggaaaattaataattgctagcctggtccaagctcaaggttgcttttatcatgaaagggctagactcttgtgcagtaaataattgtttacatgtggccctcccctcttccctcctaccctggactgtgagccctggggcaggaatggccgtgagccattttcatgatggaaatgaacaagccagtgattagtagtttattcactaaatcttaatttttttcagcaaatacttcttgagggcctactctgcgccaggtgttggggttagaaaggtgagcaggataaaacttgttctcacagttggcagtcaggtggagaaagtgacaaacacgcaatagtggggtgtgacaaatgcttatggaggggctaacatgagctgtggttgcacctgataaagccttagtgtctaccaggaaagggtttttggttttgttttttaagaggagttaaaatgtgtttaccttagtcactccagggtggggtggggagcaatgcagatattctagggagagagattaacgtggacaaaaatccaaaggtgcaagagaacttggagttttgtaggaagtgaaggaaattcatcatgactggtaacttacactgcaaggaaggaaacagagggaatgactagagggcagggagacaccttgctaccaccagcaaggaaggctgtaaagaccatgaccttgggcagaggtagtgcagtgggagtggagagaagtggacttgttcaagagagatttaaagagatagacttgacagatgttaatgatgaactgatgtgggaggtaagagacgttggagttaaagactcccacttttggggttggtgccattcatttacatcagagatcaaaggaggaggctgcagagagatggggaaggagggttcagtttaggacaggtggagtttaagaggagccgtcggctgggctcacgcctgtaatcccagcattttgggagaccaaggtgggtggatcacgaggtcaagagatcgagaccatcttggccaacatggtgaaaccctgtctctaaaattaatcaaaaattagctgggcgtggtggcgtgcacctgtagtcccagctattcgggaggctgaggcaggagaatcgcttgaaccgggaggcggagattgcagtgagccaagagcgccactgcactccagcctggcgacagtgagattctgtctcaaaaaaaaggagccgtcagggcagccgttcagaacgtgggctgcagttgagagctcttgtgcagaacgtgcaataggacttatcagctgtaagatgttactgaagccaagagggcgggtgacctgcctatgaaatgaatctgagtggtctcagctcggggcaactttgtccctcacaggacatttggagatgtctggagagatttttagttgttacaacttgagggtgagggtggagaatgctactggcatctagtaagcatatgctaacagtctaaatgcacaggacagccccacaacggaattagccagcccgaaatgtcagtagtgctgaagttgagaaatgctggtctagagaaaggatagacggatcctaggatgaggagtgaacagaaaactaggtaagacaaccaggaaggtggggggcatggaaatgaagggaaaagtgtgtttcccaagagtgtcgcatacttctgggaggtccaacaggattgaggctgagtatgcctactggatctagcactagggaagtcatgggtgaccctgctgaatagtgagggcagaagcaagttgcagggatggaggagtgggtagcaagagaaagggtgtaataataacagctaaggactgagcagttgctgccaggcactgtgctaaacattgtatgtacattattactttgaatcctcacattcttatgagatgcaaagatgaaggggctaaggaggctgaggagggttcatataaagcactttggagttagatcttcatttgaagctgtcagtcactagctgttgaccctgggtcagtcagctaacccctctatactgaggtttcctcatctggaaaatgggagacggacattaaaaagcacttactggcctttcaccaaataccagataatgttctaagcacttttacatgaatcaccttaattactctcctaacaacctaacaaagaggtatttttattcccattttgcaggtaaggaaattgaggcactgggatggaaaataatttccctaggttacttagctagctgtaaatggcagagctgggatttcaacccaggccattttaccttgaatgatgaacctacctactatgtgctagtcactgtgctgccactttatctggcacttatttcaattatcttttttttttctgagacacagtcttgctctgtcacccaggctggagtgcagtggcgcaatctctgctcactgcaacctccacttcccgcattcaagcaattcttgtgcctcagcctcccaagtagctgggattacaggcgtccaccaccatacctgactaatttttgtatttttagtagaggcagggtttcaccaccacgctggtctcgaactcctgacctcaggtgatctgcccaccttggcctcccaaagcgctgggattacaggcatgaaccactgcgcccggccaaattctcaaaaagcccaaggcccacccccaaccttattttacagacaaggaaaccaaggtccaaggtcacaagctaataaatgtcagagctggaattgaagtccacttctgtctgaccagagtctacactctacctcattactgacttccccttccccttagattgatcactgcgcttccttaagtgcttctacatctgccatctttctgttctcccaaaacatcctgtgaaagcaggcagaggaaggtcctgcacatatttttgacaagtcagtgcacctcagttttctatctgcacacatgcatctgcaggtttttacctgcttgctcctgactttcaggattgccatgaggaacaaatgagaactagatgtccaagcgctttgctaccataacgtgagaaatggtattagtagccccatttatcagatgatggaatggaggttcagtttttgaaacagcccgtctgcttatgggcatgccttacttaggtgtaagattctttgtaggggtcatctgtctgccttttcgtcttgctgtttctgtgttggctacgtataccagccagccttttgccttctgcgaggcctatggctcctagcaaccagctgctaccaccagcaaggaagggaaagagctgccaggagctttcccagttggtacataataaggaagcaatacagcatcctattaaaagcagatttttagaggggaagagatctaggtttgaattccactatgagctacagtatgttatcctccaacgtaaaatagagtaatactctccttagatattttcagctcatttaacccccacaaaaatagagggcttttctttttttaagttttatcttcattgtgttttctgatgataaaaataattcagttgccaattctaaaacaaaacaaaacaaaaaaaacttaatcatctgaagcaaattcagggttaagtttacatgagagaagaattgcatgtcggtggtttttgcagaacccacataattccccatcaagagaagatcatcattaacagtttgcaggggtgggtgggtctgtgagtatacatacgtctcaatacatattagaaaccccagttaagaaatggaggtacaggctgggcagggtggctcacacctataatcctagcactttgggaggccaaggcaggcagatcacttgaggtcaggaatttgagaccagcctggccaacatggtgaaaccctgtttctactgaagatacaaaaactagccaggagtggtgttggggacctgtaatcccagctactcgagaggctgaggtgggaggatcgcttgaacctgggaggtggaggttgcagtgagctgagatcatgccactgcactccagcctgggtgacagagcaagactgtctcaaaaaaaaaaaaaaaaacacacacacacacacacacagaaaattctggcagttcgctctctggtttaggtttcggtcagatgtcaacccttttaatccttagaacaaccctgtgaggtgctggtctacttcacccttggcaattcaaaacatgtcctgggccaggcatggtggctcctgcctataattccagcactttgggaggctgaggtaggaggatcgctggagcccaggagttgaagacaagcctgggtaacctagtgagactccatccctctctctctcttttttttttttaagtgcccagcatcacctgggagcttgttagaaatgcaaaatctcgggcatcaccccagggagacggagaccaaatccacattttcacaagatcctccaggttatttgtgtatacattacagtctgagaagcctgctatacacctgctgcacttgcttgtagagcagggaaggcactgaggccaagcttaggggtgtccacaacatgaccagggcagaatgagcttctccaacatgagctgtggcccccagcccgcccagcaaagttggtccctgcttcttctgctaccaccatacttcatgtctaaaagtgatcttctctcctccaggagctggtcgctgtcggctaagcaagattggagctactcgtcgtccacctccagctcgcgtaagggtggctgtgcgactgcggccatttgtggatggaacagcgggagcaagtgatcccccctgtgtgcggggcatggacagctgctctctagagattgctaactggaggaaccaccaggagactctcaaataccagtaaggttcaggccactcctcttccctcatgccatcacctccctctcctaggcctgcccacgttcccctgcctccccaggatccttgctccctccttagcaccgctttgttccctgagccttcactgttcacttaggaaatgttgacaggtgcccccatgatgggccctctctgggatactgtagggagagatgagaggttgaatcaaacatacattactgtgcacagagagggaggagcaatgagggtgagcaggtgagccccaagtagaggctgggggacatatcaggagggttggcggaacacagacctgccagccagcctacccaagctgcagctgggtagtgtcagagaagaccacccagatttggggacagaactcagaagggcagctactttataatcctactggggatttaaagttcaaactccttggcctgtttttctaggcgggggctggcaaaccatggcctgcaggtcaaatctgatcaggagtaagattttcagtaaataaaattttatcgtttatttacatattgtctatagctgctttctgactacagtggcagagttgagtagttgtaaaaggaacacatggcccacaaagcctaaaatatgtacaatctgcctttttacagaagtttgctagctcccatactaggccgttaacaatttgggcttcagtttctttccagcctcattccctcaatatatattaaactccctgctgtggcctaagctgcacttctccaccagaacgcagtggataggtgattggtatgtagagtctagttcagtcataagcagcatcctctattttccccattatggtgtaaaatacaatgttctacacatgtagccatttgaaaaagactgggaagccttgcttttttgctattcttgattctcagaatttctttctttggtcaaaatcttccttccttgagcagaatcagttactcctttgagagtgtgttcttatcttcgtttcctaaatcacagcaaagtgtggatatctatcctaccagactgaaaaactccaagagcagggatatcagatctatctctgtattcctaacaccaatagagagatgaggatggagtaggtgttaggtggatgctttttaaggtctttgtacaagaaaggggatagagacgttctcttaaatccaaggtccagatgagagtagaatcccttacccacccccaccccactccaccccttacacacacacacacacacacacacacacacacacgctaatttctttctttcttcctgcaggtttgatgccttctatggggagaggagtactcagcaggacatctatgcaggttcagtgcagcccatcctaaggcacttgctggaagggcagaatgccagtgtgcttgcctatggacccacaggagctggtgagggagccagaaaagaaacagctatgggtcagaaagggctggggaaacggagaggaaaacctcacagttttctccactctcttcccagggaagacgcacacaatgctgggcagcccagagcaacctggggtgatcccgcgggctctcatggacctcctgcagctcacaagggaggagggtgccgagggccggccatgggccctttctgtcaccatgtcttacctagagatctaccaggagaaggtgaggccccgtgctggttgggagaggagcaacaaagggtcaaagtaagacctggttctagaacatgaagctctgctgtagcagggaggtaaggtgagacctagaaagacagagactggggtagcagatggtacaactccgagaatagaacagagaaaggaaactgatccccaggaagaaacagcctctctatggagaattgcccttccccttcactgcttacacaggtattagacctcctggaccctgcttcgggagacctggtaatccgagaagactgccgggggaatatcctgattccgggtctctcccagaagcccatcagtagctttgctgattttgagcggcacttcctgccagccagtcgaaatcggactgtaggagccacccggctcaaccagcgctcctcccgcagtcatgctgtgctcctggtcaaggtgaggccgcagacaggggcgaggacctgggaagcccaggagcctgagctaagcacgagacctttgttcttacccccaggtggaccagcgggaacgtttggccccatttcgccagcgagagggaaaactctacctgattgacttggctgggtcagaggacaaccggcgcacaggcaacaagggccttcggctaaaagagagtggagccatcaacacctccctgtttgtcctgggcaaagtggtagatgcgctgaatcagggcctccctcgtgtaccttatcgggacagcaagctcactcgcctattgcaggtcaggcccacctgtctcagggaagaaggggctgcagaaggaggttctcaggcctgctgtggggtggggaatagcagttgaggcataggaaggctgggcttctgacccacccactgcctggtctcaccctcaggactctctgggtggctcagcccacagtatccttattgccaacattgcccctgagagacgcttctacctagacacagtctccgcactcaactttgctgccaggtccaaggaggtgatcaatcggccttttaccaatgagagcctgcagcctcatggtgagaactgggggaggcaggagtggaaacgctgggtctggaaattagggagtttgttgaaaccaccaagcatcagcacagaggctgaccacccccaatccctctctccaccccatcctccaatcatctagccttgggacctgttaagctgtctcagaaagaattgcttggtccaccagaggcaaagagagcccgaggccctgaggaagaggagatcgggagccctgagcccatggcagctccagcctctgcctcccagaaactcaggtgagcagtggggccttgggtgtatccccttcctgatgtatggcttagcagcagagctgcaatgcccgtcagatccttgagcagagagctgtgatcttgttcctctcccattaaattcaccctaggccggatgcggtggctcactcctgtaaccccagcactttgggagactgaggttgggtggatcacctgaggtcaggagttcgagaccagcctggccaacatggtgaaacctcatctctactaaaaaatacaaaaagtagccggatgtggtggcatgtgcctgtaatcccagctacttgggaggctgaggcaggagaatcccttgaacccaggaagcagaggttgcagtgagctgagattgtggccattgcactccagcctgggcgacacagcaagactccgtctcaaagtaaataagtgaattcaaccctggctaggcacggtggctcacgcctgtaatcccagcactttgggaggccaagacgggtggatcacctgaggtcaggagttcaagaccagcctggccaacatggtgaaaccccatctctactaaaaatacaaaaattagccaggcatggtagtgggcacctgtaatcccagctactcaggaggctgaggcaggaagaattgcttgaatctgggaggtgaaagttgcagtgagccaagatcatgccactgcactccagcctaggtgacagagcaagactgcatctcaataaataaataagtaaataaataaattccccccaaattctactccattgaatcactaaagtctaagattaatctctcctcagtgctgctgccttggggacctaaggaggcctcctcctggggatcctttccattttccaacccctttagccttcagcaaaacttctcactttgggacagctgtttcaaggatgagcatttttgcttctggttcaaggagtgatctggatcagatctttcagatccatgagagcaaagcaaaggagacttggaagagctgtcctgctgagaccatctggtctgtgtgtcagtgcccagcttctccatgactctccggggagccagctgctgtcctaactgcgtctaccctcaatccagataaagcctctaaactaagtcctttgtgtcacctcctgccccaactccaatcaccccacctcatggcccagtatgtactaatcctcaggtcatctctgttcaggggtcttgctttctgtgtctggccacttagcccttgcgctattccctccaccccccaggagccagttgcagttttaactttgccctgtttctacccctagcccaaataaagcctgtgaactactaaacagaggtgacctgaggtggccaagggttagtgcccactctgtcccagggggctactgtagttaaggaagatgccacacacaagaagatgcttgtgcactcatgaccccatctctcagtcttgtctttcccaaaccatctgtcagcactccccactgctgtgtgcacccagaaatgtgcacaggtaagctgtcagacaggcactctgagtaaggggaagctcagagttgggcacatcaaacccagcagacccagagcttgggggcctcacaggagagcaagtcagatgggaacatcagtatatgataccaggtggagaattcagaatcaggaaggagtagctgctgctgctgtgagagtcaggaaggaagagatgacttctagtgtttgcccacgtatgttctgatcctgtttttccaaggcactagcatggaaagcacaggagtgtccctgtcctccaggagccagttcacagcataggaagggagatgcattgttaagcttggcgtcatgggaaaggtggcatcaaactgacctggaaagattattgatacagatgtgaggaggtgtggggcaagattccaggcaaaataaatgaatgttagacgttgctgactgggcgcagtggctcacacctgtaatcccagcactttgggaggccaaggtgggtggatcacttgagcccaggagttcaagaccagcctgggcaacatagtaagaccccatctctacaaaaaataaaaaaattagctgggcatggtggcatgcacctgtggacccagctactcaggaggctgagacagggggattgcttaagcctcaggaggccaaggctatagtgagctgtgatctcaacactgcactccagcctgggtgacagagcaagaccctgtctcaaaaaaaaaaaaaaaaaaaaaaaaagaatgttaagccttaccgtgctcagagtcagtcaggactgcttgaacaggccttcccagctgcccacagcagggaagcttggcagctgaggtcttcggtggatttcaaagccctgctaaagatggcatcctctgtgatgttttccgcaactgctcctccaaatggataggcactgtcctggctgtcaccttattatggtctcttgatttcctcagtagacagtgcctccagggcagggcagtgtcttaggtctctcatacctggcactcaagtgttcgcctgatttcctggcatccccgagcagtcacttcacctgatgaagacactgcacccagagaaactggatgcctagcaagttaacattaggttctggagctacaggatataccaagttaaggtgtggtgaggggagtcctgctgctgtaggtggtgatgagggaggaggtaggtggggagcaacttctttttctgctcagccccctacagaagctaagcagcatggacccggccatgctggagcgcctcctcagcttggaccgtctgcttgcctcccaggggagccagggggcccctctgttgagtaccccaaagcgagagcggatggtgctaatgaagacagtggaagagaaggacctagagattgaggtacgtgttttagggatgtgggagctggattcctattggccttgagaagcaatccttggatcttcagacagggaaggacactcaggctggactagagtccagttttctcccaataccggaagttctccagcttctgcttgaatgtccttaacatggctgaactttgacagacaattgagaccagatgtgagggtgagaagaaaaagttcaaagtaaaagcaacaaatgttaaacattacatttcctaaagcccagctcaattaattgaggactgtgcttgaaaagcctttcccttcaatatttgcagaggcttgttccacctctgggtagccccctaatcacagaaagcccttaattatgttaggctccacctgtctcctggtaacctcccactggtcctagccctgccctctgggggctcagagccttgcatactcaccctggtaacccactcccttcaggctgccctggagttgggtctggatcacatctccctgatcctttccaacagaggcttaagacgaagcaaaaagaactggaggccaagatgttggcccagaaggctgaggaaaaggagaaccattgtcccacaatgctccggcccctttcacatcgcacagtcacaggggcaaagcccctgaaaaaggctgtggtgatgcccctacagctaagtaagtttgactccaggggctggggggccaaggcagctgagatcctataagggaggaagtgttaggagcagctgtctccatgtcattcatattctcccaccacataccagtcccagggaggggtgaggaggctctgaggcagtgctgggggtgctctgccctcgggtgtttaggacagtgggatggacaaacgagtagaggattgaagataatgcaagactgactgaaattcctttaaatgcgggtataaaaaaggtcatgtggaaacacaacaggttaactctggatggaggggagctggggaatcagaaatggaagaatcgaagggctaccagggagggtgaaaagtaccctttgccctgactccaattctcgattcctactttcagttcaggagcaggcagcatccccaaatgccgagatccacatcctgaagaataaaggccggaagagaaaggtgaaagtagctgggggcttaggctacacctggagcccagaagtaagggggagtaggctctagggggaggagcgttggccttggggttaaacgaactggatgatggccgccagctactaacagacctcaacttgcttacccctggaatgtggtgatggatggttccttgcagggcatttagggtggaaggcagtgatgtggatgtacctcgcagagcggatgttccactgtgtagcctggcttctaccctctacaagcttaagagggaaaacttagggaactatgacctaagcagtcaagcaagaaaccacacatatgcacatacccagaatcgaacaccactagaactacccaaaaactgagatggttgggggaggtatcatttattcatattactttctcccatgtactttttgaaagacagcttattctttcccttttagagatgagggaccagatttaagagcttattttgtgctttacattcattaactcacttgatctccacagcaactccatgagaagggtgctaatattaccactgggtactgagtagtacctctctttcactagttgcataataagaattaacccagagagtgacctgagggcgggattttggacacacttgacaagagaggaagaggctggagcgcaggaggtagctggtgctgggctcctagtcttggcagaggagcccaaagcacttggctgccctgcgtgtcactcatctccctttgcctcccagctggagtccctggatgccctagagcctgaggagaaggctgaggactgctgggagctacagatcagcccggagctactggctcatgggcgccaaaaaatactggatctgctgaacgaaggctcagcccgagatctccgcagtcttcagcgcattggcccgaagaaggcccagctaatcgtgggctggcgggagctccacggccccttcagccaggtagcagcccactggactgggggagggcgggggcgggggagaccgggtacccccgagaccctgtcccctatcgatcctgtcccgccaggtggaggacctggaacgcgtggagggcataacggggaaacagatggagtccttcctgaaggtgaagtcacggccctgcccctcctctgcctgtcctgcgccccgcgcccctctctaacgtcgctgtctccctccctcctgtgttgcaggcaaacatcctgggtctcgccgccggccagcgctgtggcgcctcctgaccgtcgtctcctcactccgccttttcaaatttttgtataaccccgtgttgtgtaaatacagtttttgctccggtgcttccgcctgatttttggggctgcgggggcgggaccggggtgtgaccgcctcggggtgggccgcgagcaaggcaggcgactccactgggcgccatcttcggggaacgactcagcgcaggattgtaaatacaccgctggggtggggcggggaggacggtggcctgcaggacgcaaaaagcggaagccgaagcatgaggcctgcgaccgttaggcgggcgcgcgctcagggattagccccgccccgtccgtgcccccggcgcgcgcgctcccccattctcccgctcggcaacgacggcggccttgtgcgcgtgcgcgcgaaataacggccgctggcggagggagggggagtggaatcgttggcggggggaagaggagagaagccgccctgtctcccgcgcgcccaccacctgcgccatcgtcagccaatcagcagccgtctcaggggtctcgcgctcggggcgactcgggctgctgggtggctcccccgtccctcctcccgccagagtccctctcgcgcctgcccctcccgctggccacgcgcgcgctcgcgctagcgctcgcgcccgctccagcctcttgtgtgtcctcgcgccccccgcccgccctccccgcgcgtagtgtgctccgcttcccccaccctccacctcccccctcctgcccgccccgcgcgcctcctcccgggttccccctcccccaccgccgccgcctcctcctcccgccccagggtgagcgcgagccacctccctccctccctccgccatggatcccagcaactggagcagcttcatcttccaggtaacaactccctccccccgcccccacccccctgcccacaccccctcctgcccgccctccctcccgtcccaccccccctccgcgcgcccggtgcgcgcgcagctgtccccctccctccctcgcgccctcccccgccctccccgaggcgccggctgggcgcgcgcgcggcgggggccgaggctgctccctcgctccccccaccccgccccgccaggctccaaccgccgccgccgccgccgccgccgcccgggcccccgcccccggccccggccccgcggggcctcccgcccccacccagggggcgtcgccgccgccgtcgccgcggcgctccgcggcccgcaaggcgccctcttttcctccctcccgccggccggggtgcgcgggcggcggggcggcccgcgggccatgcgttcggcgcggcccagcccggccggccgggggcggcgccccgagcccgggccccgcgcggcccgcgcccccggcccccgctgagccccgggggccccgctgcggccgaggccatgttcccggtgtttccttgcacgctgctggccccccccttccccgtgctgggcctggactcccggggggtgggcggcctcatgaactccttcccgccacctcagggtcacgcccagaaccccctgcaggtcggggctgagctccagtcccgcttctttgcctcccagggctgcgcccagagtccattccaggtgagtagggccggccgcggcggcccgggctggggggggacgcccgcccgcacccgcggcccactcggcgccttgtctccgcaggccgcgccggcgcccccgcccacgccccaggccccggcggccgagcccctccaggtggacttgctcccggtgctcgccgccgcccaggagtccgccgcggctgctgcggccgctgccgccgctgctgccgccgtcgctgccgcgcccccggcccctgccgccgcctctacggtggacacagcggccctgaagcagcctccggcgccccctccgccacccccgccagtgtcggcgcccgcggccgaggccgcgccccccgcctccgccgccactatcgccgcggcggcggccaccgccgtcgtagccccaacctcgacggtcgccgtggccccggtcgcgtctgccttggagaagaagacaaagagcaaggggccctacatctgcgctctgtgcgccaaggagttcaagaacggctacaatctccggaggcacgaagccatccacacgggagccaaggccggccgggtcccctcgggtgctatgaagatgccgaccatggtgcccctgagcctcctgagcgtgccccagctgagcggagccggcgggggagggggagaggcgggtgccggcggcggcgctgccgcagtggccgccggtggcgtggtgaccacgaccgcctcggggaagcgcatccggaagaaccatgcctgcgagatgtgtggcaaggccttccgcgacgtctaccacctgaaccgacacaagctgtcgcactcggacgagaagccctaccagtgcccggtgtgccagcagcgcttcaagcgcaaggaccgcatgagctaccacgtgcgctcacatgacggcgctgtgcacaagccctacaactgctcccactgtggcaagagcttctcccggtgtgcacggggcctcggccgcccgctaggccgtggggagggagggacgcgacggaggtggcctggccgtggctggcggggagggaggcggctgctgaggctggggaaggggagccactcccagggcggagggaggaagcctctcccggttaccagggagcaaggggtggtcctttgtcgaggaggtgggccttggggttgacggaagcttcgcgtgggaggaggcggcggcggcggcagcggctgctgggctccaggggagggatttcctgcttaagtgtcgctgtgacggcctgggctccgggaggaggcgcagggatcctcggaaaggcctgtggtgcggtttggtggatttggggcgcaccacctccgccctaaccccaaccccaacgtgtccccaggccggatcacctcaacagtcacgtcagacaagtgcactcaacagaacggcccttcaaatgtgaggtaggaagcccgcctcctcctgtcttggttttcatgattttgatcctcatggtagctgtctgagtcagtctctcagaccccctttttctctctcttctttttgcctttttgctccattttctcatcccttcttcaaggcctcatcatgtcactcccatttcctacagatcaaagatccccaaggctctgattcctttaatctcttgctcccccctccccagcccaccaagctttaactctcctgtgacaccccccacgcccctcccccctcctcagaaatgtgaggcagctttcgccacgaaggatcggctgcgggcgcacacagtacgacacgaggagaaagtgccatgtcacgtgtgtggcaagatgctgagctcggcttatatttcggaccacatgaaggtgcacagccagggtcctcaccatgtctgtgagctctgcaacaaaggtacatgccgagggctgccgggagggccaggggcagagggtgggcgcctggccagacgccttgccacggatacgggttaagggtgctgtagccaagagctcgtggcgtctagattcctacaagaggtcaagggagcagcggggggacacctgaatgaacatcattagactctaagaagtcctggttggaagagatgatctgccagagaggttgaacctcctggtaatgtgtggggaaagcgggagtggaacttggctgctctggggaaggagtagtcaagaaagccagttccaggggtcacaaggcaaggtttccgctgcgcagccacaaggtcttgtctccagctcctggggcaggtggagtacacgggccgggctttaccagcacgcaccctgcacgggtagcagagaaagctgccttcagtcagactcaccggttaactgggttgagaccgcggggcactggagggaaggggacacagccgtctctgctgagggtcaaccctgcaagtggctaggagtcagtgtctcgtcatcctgggagaggtctcccggccatggagaatgagttctgtaggtaccaaggctgagaagcgggcaccacacaagccaggccccaggctcagggaggggctgtgtctaccagccccaacagagcagttggccccaggctaccaaggataccgtgggaggaggacagggccatctgaggagggcatcccccgcctaggagatcagccccgtctctggggtctccgcctggctgacccccgccccatcccaatccaccccccaataggcttcaccacggcagcatacctgcgcatccacgcggtgaaggaccacgggctccaggccccgcgggctgaccgcatcctgtgcaagctgtgcagcgtgcactgcaagacccctgcccagctggccggccacatgcagacccatctggggggggccgccccccctgtcccgggagacgccccccagccacagcccacctgctgagggggacccccgcacccaccaggcaaggcgtggggcatggctggggggcgggatggggggtgtgggggacaacggggctcaaagggcccaataggggatctcaggaaggcgagggatgcccatgtaccactcaggctagggagacttctgggcacagggaggatccttgagaactgctctgtctgggtgaggatgcaggctgaggcctctggggtccagataggaagtgagcaacggctgtgtcccaggggaagcaggctgggaaggtgtggggtgagggcaaggctcttgccattcagatcgcgctgtgatccgtggtgtttctcctgtgcaggtactggtgaggtttgtccaatggcggcggcagcggcagcggcggcagcggcagcagcggcagcagtagcagcccctcccacagctgtgggctccctctcgggggcggagggggtgcctgtgagctctcagccacttccctcccaaccctggtgagctccaagttggttgcgggggagaggggagaatggagtagagtcccttggtacaagctcctctcccccctcttttcccaccaactcctatttccctaccaaccaaggagcctccagaaggaaaggaggaagaaatgttttcttaggggaattcgctaggttttaacgatttgtttctcctgctcctcttctgtcagacctgaccccacacaaacctgtcccctcggttgtgttgaagtcccctggacagtgggcaggggtggcagaggacacgagcagccactgcccgtaccccctctcctctctgtaagcccatgccctgtcttcccagggacttgtgagcctcttccctcgacggtcctcttctctccttccagtcctctccccctgctgtctgcagcccctccccggggagttggtgctttcttttccttttttttttttttccagggggagggaggagaggaaggagggggatcagagctgtcccaaagagggaaagcggtgaggtttgaggaggggcagaagcagggccggcaaaggttgtaccttcataaggtggtatggggggttggggtcaggccctgaacatcgtcctacttgagaatctgtcaggggaaaaagtcaaggggagcaggaggaagagccaggagggccagaggcagagaagagatggagtcttaggggccagggtgagcgaggggtccagggcctagaggtgcttcctgggggcgggggaatgcagccagtgtccccctcccctcttccaccccagctccagccctggtcttgtcttttcatccctcttccccacgacagaagaagttgtggccctggccatgtcatcgtgttcctgtgtcccctgcatgtaccccaccctccaccccttccttttgcgcggaccccattacaataaattttaaataaaatcctgtttctggctctggattgaatgaattgccctcactaagaactgccgccaaccccaagggtttcttctcggcctggtgtccgtcaatccagccttgctctgccctgtgaggctgtgaggttctggctccgccctccccaggggcagccttactggcggcagcacagatacagggcggggccaaggctgtggctgtggagagcaagttccaggtctctggggaattcccaactcggacaggcccagaatagcccctggaggtttgaagaggccccgtcagaaacccaaacagagctgccagacgggaatgccgccctcccccgtccacactcatggccgctgctcagcccccagccgcatccctccccacgcgcgtcacggccctgaggccatggtgggtggatgcggctgcggaaaggctggggagtccgagccctaggactgggagcagcgaggtagagaatgaaagctgcacctgtccctcatcctgggcatgggccactctgtgtttacacgggctcctctgcccagctcctcctgccccttggaattccctttcctgtccccgctccgtcctttccagggccccttttttgagccttccagcgccagtttctgccgctcctttctgcaggctccattctctccaaaccccaccctgctcctcctctgcagcctccccgcgtcttgccccatcttccttgccctcctgctcgtagagacgcctccacccggtcctgcctgtctcactggtcccgtctcctcgcagaaccctctccgtttcccccaaatccccgtctcttccaggaatcccggtgaccgttggcgggaggggccggggacttaagaaggaggcgtctctcctggaggcgcgcgtgagaaggggcagggagggggcgcgagtggtccccgggccggttgcctgggtaacgcgtggctcccttgggctggcgggaggggccggaggctcgcgaggggcgggggcggcgacggcggcggagcgtaggggaggggaccggagaggaggggatgagcacacgggagaggagaagagggagacccgccgcctccctccctccctagctgacttgctccctcccgggctgcggctgctgcaaaagccagcagcggcagcgggagctgtccggaggccggcgtcgaggtgagacccgggcagactgaggctgcgggtaggagtggaccgaccgacggctgacgccgggcggactgcacgggaatgcgggtgtctggagggctggtggtggtgctgggcgggctgaaccatcgggaggaggcgccagcccaccgaaggcgagggaagccccgggagaggggctgacaggggatcgaaggagataaccaggtcccccagaaaggggcgggagcgtcctcgccctaaacgcgcagcaagaaaacccgcaccgcctgggagcccagggaggaggggaggatgcagagggagtggaatgcgaatgtcgggtcctctgcccagtcggcctgtcggagtgctatttgcacagctcgttgattttggggtgctgggatctgagagtctggatcttgttggatggacccagggagagaccctggagaaggtcctgtttacaaaagggttaatcttccccagggctctccaagcagaagactttgagtagagcactcctcccgcagggatgtcccaccctaaggcaaaggaaaccccaacttttcttcctctccctagaggcagtgcaaggctggccctgagacaggaatgtggcccaattgggcctgcagtgctgagcgccctcttccctcctcaccccaagcctatctcctcctcttccagggtttgccgctgtctctgctattccatcctccccataggggctctctcccctctcccatctcaagatggcagccagcagctctgagatctctgagatgaagggggttgaggagagtcccaaggttccaggcgaagggcctggccattctgaagctgaaactggccctccccaggtcctagcaggggtaccagaccagccagaggccccgcagccaggtccaaacaccactgcggcccctgtggactcagggcccaaggctgggctggctccagaaaccacagagaccccggctggggcctcagaaacagcccaggccacagacctcagcttaagcccaggaggggaatcaaaggccaactgcagccccgaagacccatgccaagaaacagtgtccaaaccagaagtgagcaaagaggccactgcagaccaggggtccaggctggagtctgcagccccacctgaaccagccccagagcctgctccccaaccagacccccggccagattcccagcctacccccaagccagcccttcaaccagagctccctacccaggaggaccccacccctgagattctgtctgagagtgtaggggaaaagcaagagaatggggcagtggtgcccctgcaggctggtgatggggaagagggcccagcccctgagcctcactcaccaccctcaaaaaaatcccccccagccaatggggcccccccccgagtgctgcagcagctggttgaggaggatcgaatgagaagggcacacagtgggcatccaggatctccccgaggtagcctgagccgccaccccagctcccagttggcaggtcctggggtggaggggggtgaaggcacccagaaacctcgggactacatcatccttgccatcctgtcctgcttctgccccatgtggcctgtcaacatcgtggccttcgcttatgctgtcatggtgagccccatgggaccctagcccaggcctgctgtggctcccagcttcccgccagcgctgcaatagagcctctggagtaatcatgccttccttcccctctcctctctgcatggatcccacctccccaattccagggcctttgtttgcctctccctaggacctaaccctctgagccaccactgccctgcccctttgggtgggagggatatggaaacacgtgtcacacagcctcgctgacctgtgccctcctccccctgccccttcactcctccttcctcccttacccgccatctatggggctggcctctctctcttctggatgacttttccacctgatcccttctgggctggcttctcctgaccccggctatgtgcctccacccctcgccctaaccccagtcccggaacagcctgcagcagggggacgtggacggggcccagcgtctgggccgggtagccaagctcttaagcatcgtggcgctggtggggggagtcctcatcatcatcgcctcctgcgtcatcaacttaggcggtgagtgggggcttgggacaggcaggggaggaatggaagggttggcaagggcagctttactaacccctgcccctgctctctcctgtctgtcctccttacctctcctttgtctctccttgtctccccctccccccgtctgtccttccctctcctctcccacagtgtataagtgaggggctctgccccgcatcccaagacttttcttcctgttgggagctgccttgggcccatccctcccctggggggagcccaactgatggccctggcccccacccctaaggaccaagggagcctgagcggccttgtttacagcttctgtcctgctcctgcatcttgccaggctcctctgccaactgtaggcctgcctcatccctgcactggttccaacctccctgcactaatgcctgcatcccctccggcctcttggccccctatccctgcacttctggaaacctccctgcactctggaaacctccctgaacacctccccaactctgcgctctcagcctccctgcatctctcctggcctccctgcacttcttccagccccccaaattctctggacctccaccctggccgcctcctcccaactttcattgtcttggcatctctcaaccctcagtcctctcttccttcccttctttatcatctcccctttcctctccacgtcccgcccccttcctcttcctgcctcctcatctcccttaagcatcctcttctccaacctcccgtcaccgtttactctgcaaaattgacagcacttagacgaggcttgggggcagggagcagtgttgggagagggctccccaaccccaggctcggactgttctctgctgggaccacccagggtcggacacccaagggtgcctggcaggtcgcagagttggcaagccgggcctcgtatggggactcgggtgagggtggcgagtactggttccgaacgcacgcaggggagaagggagggacgcggcgctgacccttccaggtcagctggagttgacccgcccacctgggcttttcaaccccagtccgcgagtttctttcttgaaggtgtgggggctagattcattcacgtgcttcgtaatgaaataatccaaaaaataggaccaaagcgcccactggcaggagcgagggcggggcgccgcgctctataattattttctaagatgatgggggaggtttgttgcacgcgacagcccgctgaggaggcggggaccgagctacaacgcggttcggatttggcgggggtttttttccttaaaaaaaaaaaaaaaaaaaaaaaaaaagtctgggggaagaaaaaaactaaaattcttaaaaaaaaaaaaaaaaggctattatcaaactgatttctccctttttgtatgccggatgctgcatgagtctgaaacaccaataaacggagactgcatgagactcgcctccaatctcggttggttcctgcgttcgtcccgccggcccggcggtgctgcctttctggcagaaccttactgggtggtatacgcatgcgacttcccggtggccatctttactgtgggctgaagcctgtgcgcttactcgcgcatgtgcaagccttccctcgctttcctcttccaagtagccttgcctagagcggagcctcccgcgccatttctgtgcgcctgcgtagcgtgaccctgcgcagcctgggaggcgggtcttagctccaggtgcgtacggcatctgacttgacgtggcccacaactgaaaggtctggggagaaggcgccgtgtccgggtgtggagaggggcgtcgtggaagcgagaagagtggcccgtccctctcctccccctttccctctttcggaaagtggtttctgcggggcccgggagcctcggagtaccgaacctcgatctccggggcggggtccttggtggggactgagcgccccctcccggggacgggcggtctggccgcggagtcccctgcgggagcgtgattggctggaaacggtcccgaacccccaggggagcccgatccctgggggaccctggcttcggactccagtatctgtcgtcgcagggtccctgccctagtggcctatgtcccttgctcggggccatggagacactgcggccagtacggcggcgcctctgtctgaagaaggggaagtgacctccggcctccaggctctggccgtggaggataccggaggcccctctgcctcggccggtaaggccgaggacgagggggaaggaggccgagaggagaccgagcgtgaggggtccgggggcgaggaggcgcagggagaagtccccagcgctgggggagaagagcctgccgaggaggactccgaggactggtgcgtgccctgcagcgacgaggaggtggagctgcctgcggatgggcagccctggatgcccccgccctccgaaatccagcggctctatgaactgctggctgcccacggtactctggagctgcaagccgagatcctgccccgccggcctcccacgccggaggcccagagcgaagaggagagatccgatgaggagccggaggccaaagaagaggaagaggaaaagtaaaggcacacccttacaccttgtcccggggctgctcccctgatggcgggaggaaatagggaggggaaaatgtgggacgctggaacctttgaaagtggagggagggaagccagcgggggaggaggaacgggcaggggagaagcacacgtgtgggtgggagggaggaccgccctcacccttaactatgttcacctgtcccagaccacacatgcccacggaatttgattttgatgatgagccagtgacaccaaaggactccctgattgaccggagacgcaccccaggtacaaacgaagaggaaacagttgggggaggtgaagggcctcggctcagttacccaagatcggctcccctagaggcctttgcttgctgcctcagctcccacacaacttacagctgcaggagagagtattcacccagtagcaccatctttatgacttagattactaccttgtcttccttttttttttttttttttttttgagatggagtcttgcccttgtcccccaggctggagtgcaatggcacgatctcaactcactgcaacctccgcctcctgggttcaagcaattctcctgcctcagcctcccaagtagctgggattacagacgcatgccaccactctgggccaatttttgtatttttagtagagacaggctttcaccatgttggccaggctggtcttgaattcctgaccttgtgatccgcccacctcagcctcccaaagtgctaggattgcaggcatgagccaatgcgcctggccccttgtcttcctttaagagacaattataatacaaaaaattagccgggcatagtggcgggcacctgtagtcccagctactcaggaggctgaggcaggagaatcgcttgagcctgggaggtggaggttgcagtgacctgagatcacaccactgcactccagcctgggcgagagagtgagactccgtctcaaaaaacacaattacagataattctttttttaaaaaaacaactagtcattgattctggaaaattacagataattctatcatgtttcccattcccagaagtccaagtcctggcctttcaatattatctagatctgcatccctctactaccatgtacattctttaatcacaccgctggccccatttcccaccccacatgccttcctagaatttaccctcagagtcatgcctttccttttttcttttttttgaggggtggagagacagagtcttgctgtgttgcccagactggttggtctcgaactcttgagctcaagtgatccatccgcctcggttctcaaagtgctgagattacaggcatgagtcactgcacccagcctagagccattcttgatttctctctcttttacctgaacattcacaccagcagcaagtcttggtagctataagatgtacatttccaagtacctctgctagtctccactttcaataccacatccccatccaagccactgtctttcttgcctggatagttgtagtagctcctaactgggctctctgcttccagcttctgcaattcagatgaaccttttaaaacataaatcatatcactttttttttctttgagacgaagtctttctcttgctcaggctggagtgcagtggcatgatcttggctcactgcaatctccacctcctgggttgaagcgattctcctacctcagtctcctgagtagctgggattacaaggacacgtcaccacgcctagctaatttttgtattttctagtagagagggggtttcgccatgttggcgaggctggtcttgaactcctgacctaaagcttcccaaagtgcctgcctcagcttcccaaagtgctggaattacaggcgtgagctgctgcactcagccataaatcgtgtcacttttccacttaaaattttccaagggattccatcttgccagggaagagcatgtcaaaggagaatccaagcgcttttcccgccacctccagttctctgcactcttttttttgtttttgtttttggcgagtaggggagacggagtgtagctgtgtcaccgaggctggagtgcagtagtgcgatcttggctcattgcaacctccacctcccgggttcaagcgattcttctgcctcagcctcccaagtagctgggattacaggcgcccaccaccacgcccagctaattttttgtgttggccaggctggtctcaaactcctgacctcgtgagttgcccacctcagcctcccaaagtgctggcattacaagcgtgaaccaccatgcccggcctgcactcttctttgaacagaactctgttcttgtcctggggcctctacccttgccattcccctgcccagtatgttcctccctgttcttcacattacctgtgccttcctgtcaatcaagatctttgcttctcaccctctctgaggtccaaccctgaacctcaggtcctccaagacagaggcctggggacctgcatgtttaaccagctccccaagtgatgagtgaggtccaggcaggtatggtgtacaccacctccatcccttccatgtatcttaccttcctcttctccaggaagctcagcccggagccagaaacgggaggcccgcctggacaaggtgctgtcggacatgaagagacacaagaagctggaggagcagatccttcgtaccgggagggacctcttcagcctggactcggaggaccccagccccgccagccccccactccgatcctccgggagtagtctcttccctcggcagcggaaatactgattcccactgctcctgcctctagggtgcagtgtccgtacctgctggagcctgggccctccttccccagcccagacattgagaaacttgggaagaagagagaaacctcaagctcccaaacagcacgttgcgggaaagaggaagagagagtgtgagtgtgtgtgtgtgttttttctattgaacacctgtagagtgtgtgtgtgtgttttctattgaacacctatagagagagtgtgtgtgttttctattgaacatctatatagagagagtgtgtgagtgtgtgttttctattgaacacctattcagagacctggactgaattttctgagtctgaaataaaagatgcagagctatcatctcttaaaaggaggggctgtagctgtagctcaacagttaggccccacttgaagggagaggcagaattgtactcacccagattggaaaatgaaagccagatgggtagaggtgccctcagttagcacctgtcccatctcgggccctccaactcctcccagtcccactccagtgcagccagctggctccaaggtagaaacccatgagcactcagggagcagtgtgccttcagctgcagcagaagcagcccggaggataaaatgagaaccagctgcacacgggccctttaactcccaagccccacccctgggcttggcctgccttgccctgccgggaagtgatccccaaggcagggtgagagttccccatctgaggcgtttgttgcagctacctgcacttctagatgtgagtacattgtactagccccccaaaccccaaatcaggggcagatctttgtatcccttgaggctctctttagtcctgtcttgctttgaagggccttgcttctgctggggcagggaaaacatgtctgaatcagagtggggaaggaggatgggtggtggctttgcttttggaggtttcactttccaatagttgggagtcttctgggttttgaagtaaaggcagattaacaccaacaccggtcccccacccccctgcaactctcaggcctctctctgacttcagggtcccacctgggaaatcaggtggggaaccttacagggtcattcagaccccatcttagccctagatcggtgcttgctctactcacctgcactgtcctggggacctgggctctggcctgtcaccttgagctccaagaatgtgacctgtacccattcaggccccttaactctgacagatgagggtttcttactcctccatgcagggctgggccagctgttggtctcagtcgatcattcaggaagtcattagcagagtgatttccagaaggcgtagaatttagtgaccaaggttctttcctttttgggaggagaaagtgaaaactaggatgctcagctggacccaccagcctgagattctggggattttagagctgtcccttggggagccaagcacttgggggtggaggtgatagcgaggctgatggcccctgtgttctcagctctctgcctgggtagcccctgggtgatgggggagaggccagctgtcacgtggggtatcaggtggctctgccagaaactcccttggcacacagagcactgggtcggccctcgggtgtggctgtttgggcaggacagccctctgtatgtagccttgagcaggtaggggggccaccttgagtgggtggcccagagacagcctcagggctccaaggtaacggggtgctcaggttatcttgggtgctgccctcccaggttctgggggagcagaggctgggcgctggcccaacttacaggaaacactcacctttgaactgccattagcaccatctgggcagtacacagccccacccaggtcctctagttcttgttctcggcttagaatctttgtgtttctgcctgagaagccactgcctcctagtttgtggtctctacagttatagccaggttggacttccggctccgtcctttgataactgtgtgctcttgggcaaatttcttaacttgcaggttcttgtgaggataacatgagttaattgagggcacttaacactacctggcacagattaagctcatctgaagtgggagctgttacttaggggcgtttgcctagaacacagggtccagaggctctctcccggaaacttagacccagtgagtcagaagtgaggcctgcaaaaagcagcaggagtggggttaagaattccagcctagggctggatgcggtggctcaggcctgtaatcccagtactttgggaggcccgaatgggaggatggcttgaggccaggagttccagaccagcctgagcaacatagcgagaccctgtctctgtttgtgtgtgtgtggttggggttttgttttttttttttttttaaagaattatagctcagtcctatgattaggcaagttgagaaaatattgatgaagatcaggggtgctgaagcctggttcctggggtcgcttctgatctaggcggttcttgcctctggtgactggtgttaattggcaggagtgggaggagggaggacaagtggaagtctaggctggctgagctgttctgtctcgaaaagttcctaaaactgtgctgctttaaaaaaaaaaaaagtaatttatgagacacattctcaatttccattaatcatctcctaaagggggtaaaccaggaagccgctgggtgaaaacaggctgttggcaattcctgagtcatgtgacccattctctaaagactagaatatttaacttaaatcagtgagaaactctgtgaagttgtgtccttgtttataccaaacttcatgtgccttttcctgaacctgaagctgtgggaaggtctgggggcagggccgcatcaccgaccttacgtccaacctcaggactgcctggagcaagagccctggggttggggacaaaggaggctgcctggacctgggtaagggaaggggctggaggagaatgagtgcaattccctgcccttcacagcctgcaatcggagctgtgtttttgtttttgagacagagtctcgctctgtcccccaggccagagtacaatggcgcaatctcgactcactgcaacctctgcatccctggttcaagcaattctcctgcctcagcctcccgagtagctgagactacagttgcctgccaccatgtacggctaatttttgtatttttagtagagacgaagtttcaccatgttggccaggctggtctcgaactcctgagctcaggcaatccgcctgccttggcctcccaaagtgctgggattacagccactgcgcccggcctgaaactgatctttatcctcctcccagttcctactgtgcaccagagaccctccagtctctaatacctttgacttgaagagcagtcatttttttttccttttcttttcttttcttttttttttttttttttttgagatggcctcactcttgcccaggctagagcgcactcgtgtgctccatttacggctcactgcagccttgacctcccaggcacaggcgatcctcccacctcagcctccaaagtagcagggaccacaggtgtgcaccaccacacctagctaatattttttatggtttttatagagacagggtctccctatgttgcccaggctggtcttgaactcctggcctcaagtgatcctcccatcttggtctcccaaagtgctgggattacaggtgggagccaccaagcctagtcaacagtcacttttattctcacttcactggagaggaaggctcagaggctagtaagtggcccaggagcatgctggcagtgataaaacctgctggagtgacattttcccactggctctcaatcctggatatatattaagagtcagaggccaggcgcggtggctcacgcctgtaatcccagcactttgggaggccaaggcaggcggatcacgaggttaggagatcaagaccatcctggctaacacagtgaaaccccatctctactaaaaatacaaaaaaaattagctaggcgtggtggtgggtgcctgtaatcccagctgaggcaggagaatggcatgaacccgggaggcggagctgcagtgatccgagatcgtgccactgcactccagcctgggtgacagagcgagactcgtctcagaaaaaaaaaaaaaaaatgagggagaactttttacaatagcaacgggtgaacctcacccagaccaattaaatagaatcaccggagatgggtggctttaaaaaaaggtctccagaaggcctggcgcggcagatcacacctgttatcctagccctttgggaggccgaggtgggtggatcacttccagcctgaccaacatggcgaaaccctgtccactaaaaacaaaattatctgggtgtggtggcggacatctgtaatcccagctacttgggaggctgaagcaggagaattgcttgaactcgggaggcagaggttgcagtgagccgagatggctacactccagtctgggcaacaagcacgaaactccatctcaaaaaaaaaaaaaaaaaaaaaaaaaaaaaacagatttccagatgaccagtgtgcagcccgagccgagagtctgctttagaccagagctgctcagactgtaatgtgcatgcaagtcattgagggtcgagttaaaatgccagtagattcagtggctctggggtggggccccaggctgtgttgctatcaagcctccaggtggtaccactctactcactgcagaccccgtaggcagtgtggtcacttggtcaattgccatttaagactcactaggggccaggtgtggtggttcacgcctgtaatcctagcactttgggaggctgaggcaggcagattgcctgagctcaggagtttgagaccaccctggggtgaaaccccatctctactaaaatacaaaaaattagccaggcttggtggcatgtgcctgtaattccagctactcgggaggctgaggcacgagaattgcttgaacctgggaggtaggtggacgttgcagtgagccgagattgtgccacttcactccagcctgggctacagtctccaaaaaaaacaaaaaagagattcagtatatcagctactcacagttgaccctgaagatctctgggaagtagtgactcatgactcgtttatttattaagttttgctgtagcagaagtttacttttgagccaagagtctgatccggtctccctcttttttttttttttctttctttaaagagatggggccttgctatgttgcccaagctggtcttgaactcctggcctcaatccatcctcccaccttcggcctcccaaagtgttgggattacaggtgtgagccacctctctcaggcaagagcccctcttttaactagacaatgaacctggtttctgctttggacaggctatttagttcctgcttatttaccctcatggtgggagagaccctggtgggatttggggtgaaagctggctgtggttcttgcaggagcctcatgacacctgagggaggtgtgatcaggcaagactgggcctctacactgagagccgactagggcaggtctcagaagcagagactgaaggaagttgggtggatgagtggatctggggagcaggggccaagcctgagggctgggcagagccttccaaaggtcaacacaatccttgctattgtcttttgagggccctgatctattttaagtaaaatgctctaactgcgcatgtcatctggaaggaaaccacaaaaaactcaatctgagacttgtcaccaatgtgctgcctgagtcaaagggtttccctggctcacctccatagatggcgagggtagaaggcaagacctgtcctgggtggtctaggcagaaggcccaggtttagggcatggcaggtgggtggtcagggaggtgaggtggggtcctggtgctgatgcaggggcagttgccgagggcttggcctcagaacaaggcaggagtccagccatgaggatgactcttgctgagtcactgagctgggcgaggcattcagaccccctgactgggcccagctggggcggcagatggtggagaggcctcagctgtggggggtgttggggagattatccactgatgaaccaaatggaggctgttcccagagcctgcttccaaccttgcacggccttctagagttcaaatctttcctgggggggcctcagagccctgtccatacctccgctcacagccccagcccttcctcttctcccatctggtttcctggccaggtttcggccctgcggagaaccctccaagggagcagtggaaaaagcttcacttggcagtaaagcccctacttgctgttccatccctgcagctggggtgaaataagccactgaccagtaaacaactgaggcttaaaccagcatgccagctcaggtggggagcccccagcactggttatattccctagattcctcactggataggaaagttgggcctcaggcactcttccctcctctgcagtcaaacagtgcagatgaagagccaggctctgttcccagtgctttatgtgctaacttggttgataatgttatccattctcattttgtagatgaggaaacaggcacagggtggtcaagggacttgttcaaatcactgatcccataagggtgagagccaagatccaggcatcctggctgggtgcggtggctccacctgtagtcccagtgctttgggaagctaaggctggatgactacttaagaccaggattttgagaccagcctggacaacaaagaccttatgcctacaaaaaattaaaaattagctaggtgtggcagtacgtatctacagtcccagctactcgggaggctgagatgggaggatcccttgagctgaggagttcaaggctacagtgagctgtgatcactgcactccagcctgggcaacaaagtaagaccttatctcaaaaaaaaaaaaaaaaaaaggccgggcgtggtggctcacgcctgtaatcctagcactttgggaggccgaggcgggtggatcacaaggtcaagagatcaagaccatcctggtcaacatggtgaaaccccgtctctactaaaaaaaaaatacaaaaagttagctgggcatggtggcaggcgcttgtagtcccagctacttgggaggctgaggcaggagaatcatttgaactggggaggcggaggttgcggtgagccgagattgcgccactgcactccagcctggcgacagagtgagagtccatctcaaaaaaaaaaaaaaaaaaatccagatctaggcattcccagccctctggactctaggaagtcgtctttccagaacagagccccgtattgtggagcaactggggggtggaatcaaaggtgagcaggacagggctataggaagaaaagacaaggtccccataagagtggcgagaggaacagagccaggacatcggaaagcaagcccctgtgttcccaaaccgcagaagagggagctctgatgttagacaagccaccctcctacaagcgaagggaaagtaactttgagcaaaaatgagcaacagaaaatgagatcaaggtcagatctcatacaaagttgcaagatgaaagaatgagcagcagaataacctccctgtgatgtggaaagtgtgccaggaaaacagacccaaactgtaacctctttcagaatgaggcaaggcagtgaggaaactatgtgaaaacacgaaagcagccgatcagagttgtaagcccgggcagtctgggttggaatgggtgccccgagccacgggaccatgatgcctctctagaaagacaggaccaggcattccaccagggttctagtcccaacagcaccactaacttgcttgtggccctaaaggattcattgtccctctctgggtctcaactatttagagctctactgtccagtatgggatcaaccagccatatttggcaatttaaattaaaattagctgggtacggtagcgtacccctgtaatctcagcactttaggaggctgaagcgggaggattgcttgagcccaggagttcgagaccagcctaggcaacatagcaggaccttgtctctgcaaaaaaaatgaaaaaattagctaggcgtggtggcacatgcctgtaatcccagctactcgggaggctgaggtgggaggatcacttgagcctggaggttgaggctgcagtgagtcatgattgtgccactgcattcctgcctgggcaacagaacaagaccttgtctcaaaaaataatttaaaaatttagttcctcagatgcattagccacattttattttatttttttccaagacagagtcttgctctgtcgcccagggctgtagtgcaatggcgagatcttggctcactgcaacctctgcctcccaggttcaggcaattctcctgcctcagcctcccaaatagctgggattacaggcacgtgccaccatgcccagctaatttttgtatttttagtagagacagggtttctgcatgttggccaggctggtctcaaactcctgaccttgtgatctgccgacctcagcctcccaaagtgctgagattacaggtgtgagccagcatgaccggccattagccacattttaagtgttcaggagccacatgtggatgtggctagtccaaagacagcacagatttagaatattctcatcattgtagaaagctctattggacgctgctgagtaaaagggtttttttggtttggttttgagattggagtctcgctctgttgcccaggctggagtgcaatggcacgatctctgctcactgcaacctctgcctcccaggttcgagcaatcctcctgtctcagcccccctagtagctgggattataggtacccgccaccacaactggctaatttttgtatttttagtagagacggggtttcgccatgttggccaggctggtctcgaactcctgacctcaggtgatccacctgccttggcctcccaaagtgctgggattacaggcttgagccaccacgcccggccaagttaaagggtttttaaacaagagctgggcagtgcaatggcatagctgtaaggcagcagggggtggtggggactgtggtaggtgggaaagcttgtgttccatctaaatggggcagctgctgcttgactgtaggctgtattgctggtcttctaattcttcaagtgaatcaggaattgggattttgtgaagactcacaatttctaaacaaaaagttgaagttttacagatcgtggggctcaagtataactcctcttgggctgtatccagccttgattctgtaatctgtggctcctgcctgtttttcctcggccaggccactcccttcttcccctcacttatatttttcacctggggttggaggctgggtagatggtggaattgatgaggaaccacttttttttttttttttttgagatggagtctcactctgcctctcataatgctgggattacaggcatgagccactgcacctgtcctggccagacatttttgaggccaccaccagacaaaagaggctcctcatcggccaggtgtgatggctcgcctataatcccagcactttgggaggcagaggcaagaggattgcttgaggccaggaattcgagaccagcctaggcaacataatgagacctcatctctccaaaaaaaaaaattagctagacatggtggcatgtacctgtagtctcagctacccaggaggctgaggcatggcttttgtgagctatgattgcaccactgcactccagcctgggtgacagagtaagactccgtctcaaaaaaaaaaaaaaaaaaaaaaaagtctgacctgagtctcttaaggatgaggctctggagcacctagtaaacttggtcccatttgtgtgactcaaagggacatgtccaaagtccaaagtgctgggggcaggggtggggcttaggtagggcatgtgacattcctgaacaggccaagcactgggtgaaactactcaggattcagaagcaggtgggatgggtgggtggaacatgataatcatcccccttctccttcctttccaccctacccttgctcacaactgcaggagctgaggatgggagagaactggggacgagggggccagagtgatttgcagtgttagtaatgcagctggttctatggaaggctcagttccatctgggatccctttatgagcagtggactaggtcttcacattcagcccaggattactaaagcataggaaagaggcagggaacatagacacagctcatgtaaacattccttttgtttatggccgaatcctagccactggactacctgaggcatacagatattctttggctatgggctgacatttgaatacagctggggcctcaggattctctgaaataaagggctgcctccctctggaggagccaggcagctcctcagagcagctgcccattgcgtgctggacaaggccatgtcaccacctccatggctccccagtttcccagcttgctgtatctctccaccgtaagagactgggagcaccttgatctgaagctctttgcagtgccggtggcagtgtagggggaagtagttgatgggagtgagggaaaggaattggcaaggaaccctgggcctctgtggctcactgcatcaagcagttcttggcaaaggtaaggtcaggatgggctgtgtcgtcttgggtggggtgaagacagggagcagtgggcatgcagatgcggacagggaagggtgcagtggcctggctggaggaggtagggccgtatcccacccagagtctgtcaccagattcatgcctgccccaccccaggctccccaggttcatcctgtgtcgtctcccccacctaccagtcatcttcttgtgagccctgggcttaggagtcaccatggcaactgaagagttcatcatccgcatccccccataccactatatccatgtgctggaccagaacagcaacgtgtcccgtgtggaggtcgggccaaagacctacatccggcaggacaatgagaggtgggtgtgggggctgggctgtgggggatccttggggatgtgggggcctgtttggctggcatgatggtccttatcctcctccctcttcccaagcaggagtggccctcgcttgggcgatagagaggtttctctctcatttggtgtcctctttggtagtggagacctggtcccaggtcctcacacctcttctcatcttcctgcagggtactgtttgcccccatgcgcatggtgaccgtccccccacgtcactactgcacagtggccaaccctgtgtctcgggatgcccagggcttggtgctgtttgatgtcacagggcaagttcggcttcgccacgctgacctcgagatccggctggcccaggaccccttccccctgtacccaggggaggtgctggaaaaggtacctggtttcctcactccctatgccccaccctacctgtcctccacctgccttgggctctatactgctgccttcttcttctttttttcttttcttttttgaggcagagtttcactcttgtcgcccaggctggagtgcagtggcataatctcggctcactggaagctccacctgggttcaagtgattttcctgcctcagcttcctcagtagctgggattacaggcacccgccaccacgcccggctaatttttgtatttttagtagagacagggtttcaccatgttggccagtctgatctcaaactcccgaccccaggtgatccacctgcctcggcctcccaaagtgctgggattacaggcatgagccactgttcccggcctgtaccgagttctaaagggaaaacaaaccagggcagtgggaggggtggggagagacacttgctggctctcaccaagggtggaattgactcactgtacctccactcacctccagccacccccatcctccacacatgccccaaacacacctgcctcttttctgagaactgttggcccatctcaccttcccaggctccagagcctaccagaagtgcccagccagtctggcattaaatgacatgtgccaaggttaagcagttcattcacccggtgccagacactggtgggcagtgccaaagcagcagtgacaagcccaggccccaggctgtgcctgttctaggagaagccatcacaggcctgaacctacagccaggctcttgtccccgttggcctcaggcctgggcctgagcaggtgggtgtcccaccttcattcctttacctgttcttccacctttaccttctggccatttaatggttttgggttttttgtttgtttgtttgtttgtttttaatagagacggggtttcaccgtgttagccaggatggtcttgatctcctgacctcatgatccgcccgcctcggcctcccaaagtgctgggattacaggcatgagccaccgtgtccagccccatttaatggttttcttactgactttactaaccagtgctgcttgatcctgaaagcataatagcagaacatggggaacttttagagacattcatgtccacttaggtgcagacagtttgggggaagaagtgtgtgtgtagagagaaaatgaagaatgattaagacaataacccttaaggaatccaagtgaaaagtatatagggattcttgtacctttttttttttttttttttttttgagatggagtctcactctgttgcccaggctggagtacagtggcataatctcggctaactggaagctctgcctcccaggttcacgcaattctcctgcctcagcctcccgagtagctgggactacaggcgcccaccaccacacccggctaactttttgtgtttttagtagagatggggtttcaccgtgttagccagggtggtctcgatctcctgacgtcatgatccacctgccttggcctcccaaagtgctgggattacaggcgtgagccaccgcgcctggcctttttttttttttttttttctggatctccccctgttgcctagacgagagtgcagtggggtgatcatagctcactgcagcctcaacctcctgggctcaaacgatccttccacctcattctcccaaaatgctgggattgcaggtgtgagccaccaagccctgcctaagctttcattttaaatatgttcagccgggcacagtggctcacgcctgtaatcccagcactttgggaggccaaggtaggcagatcacttgaggtcaggagtttgagaccaggctggccaacatggcgaaaacccatctctactaaacatacaacaattagccaggcgtggtggcatgcgcctgtaatcccagctacttgggaggctgaggcatgagaattacttgaacctgggaggcggagattgcagtgagctgagattgcgccactgcgctccagcctgggtgacagagcaagactctgtctcaaaaaaaaaaaaaaaaattagctgggggtggtgacacacctgtaatcccagccactcaggaggctgagacagaaggatcacatgagcctgggagattgagactgttgtgagccatggttgtaccactgcagtccagcctggatgacataggaagaccccatctccaaaaataaaaaaaagccagctcttcctttgagccccagtttcagttcaaagggccttctctaacttctccttcatctgaactcctgagacagggtcttgctctgctgcccaggctgaagtgcagtggtgcagtcatagctcactgaagccttaacctcctgggctcaagtgatcctcccacctcagcctcccgagtagctgggactacaggtgtgcgccgccaccatgcctggctacactttttttttttttttttttttttagagatgggatcttgctatgttgcccaggctggttcttgaatgtctgaggtcaagcaatcctcctacctcagtctcccaaagttctgggatgacaggtgtgagccactgtgcccggcctccaccccagtcttatttcaggacatacagagatggatgttgtggacccgcctccagagcatcaggcttggccctggggtcacagcactgatggttctgtgtctccaccttcttccccactaggacatcacacccctgcaggtggttctgcccaacactgccctccatctaaaggcgctgcttgattttgaggataaagatggagacaaggtggtggcaggagatgagtggcttttcgagggacctggtaagttctgtctccatagggctccctgccttcctgtcatagccctgataccttctgaccatcaccttccctccccaggcacgtacatcccccggaaggaagtggaggtcgtggagatcattcaggccaccatcatcaggcagaaccaggctctgcggctcagggcccgcaaggagtgctgggaccgggacggcaaggagagggtgacaggtggggtcaccaaggggcgatgatggtgggtgggcaggaggggtccccactgcaggggaagcaggggaaggttgaggaaagcctcctgtagccccagagaggcgctttcctggtatcttttgaaagctgttgagggccacccactgctcttccttccccacccccgcttcatgctgtttccacttgggctggaaaatgtgaccatgaccatgcggatgtggcttttccttccctcaccttcaccatgagctgtgggcagtggccatgacttacctgattctggatcaacaaagaagatgttcaaatacaattgacaaatgtaggccaataggtacagtggctcacacctgtcatcccagcactttgccaaggtgggtgaatcgtctgagcccaggagcttaagaccagcctgagcaacacagtgagaccccatctctacagagaatttaaaaattagcctggccttggacacacacctgtggtcccagctactcagaaggctgaagggggagaatttcttgagcccaggatgtggaggctgcagtgagctgtgactgcaccactgcactccatcctgggccacagaggtactaccccgaggtgctaccattcccactttttttttttttttgagacggagtcttgctttcttgctgttgcccaggttggagtgcagtggcgcgatctcggctcactgcaagctccgcctcctgggttcacaccattctcctgcctcagcctcctgagtagctgggactacaggcgcccaccaccatgcccagctaattttttttttttttgtattttttttttttttttttttagtagagacagggtttcaccatgttagccagggtggtcttgatctcctgacctcgtgatccaccaggttcggcctcccaaagtgctgggattacaggcgtgaaccaccgcacccggccattcccactttctatatatcaaaactgggatgcagaatgcaggttgcttgccctggggtgtggccaggcagggcgaggctgggacctgcatccaggcactctggcttctccagtaaaccaaaggacatccacaactctaacagaggcagttctgctgcctgttttagcagaaggacaaaagttggtctttggagcttagagaaggcagaacaggctgttggcatagcagcaacttgggcatcttaggaggccaaggtgggcggatcacttgaggccaggagttccagactagcttgggcaacatggtgaaacaccatctctacaaaaaatacaaatattagccgggcgtggtggcacgtgcctgtaatcccagctactcaggaggctgaggcatgagaatcacttgaatccaggaggctgaggttgcagtgagctgagatcacagcctgggcaacagagggagactccgtctcaaaaaaaaaaaaaaaaaaaaaaaaacttttaaaattcaactggggtgggggtttggcctcaaaagaatgaataagaggaccgcagtcaggaacttgagcctggggtcagtgctatctttttgcctatgaaatctgtcaatcccctgtgtctaagctgtgggggaggggtaggtggggagcaggctggggggcccttgtcccttaccctccactcttggcccaggggaagaatggctggtcaccacagtaggggcgtacctcccagcggtgtttgaggaggttctggatttggtggacgccgtcatccttacggaaaaggttggtgctctgggggctgtggtttaagggacctggggctagggaaccctccgagtggcagagaatggtggtagaatggcatgagagtaaaagagaagcaataattttagggtcacttaaaaaaattcagagatcagattgcctgagtattctggatcatctgaagggttaaatagtctttctggggctgggcgcaatgactcacatctgtaatctcagcaatttggaaggctgaggcaggaggatcacttgaggccaggagtctgagaccagcctgggcaacacagtgagaactcatcgctacaaaaaatttaaaaattagctgggtgtagtggagcatgcctgtaattccagttactccagaggcgctgaggcaggagaatcgcttgaaccccagaggcagaggttacagtgagccatgatcatgccactgtgctccagcctgggcaacagagcgaaaccctgtctcaaaaaaaaaaaaaaaaaacaaagccggtcgggtgcagtggctcatgcctgtaatcctagcattttgggaggctgaggtgggaggatcacctgaggtcaggagttcaagacaaacctggccaacatggcgaaaccccatctctactaaaaatacaaaaattagctgggcatggtgtcacccacctgtaatcccagctgtactcaggaggctgaggcaggagaatcgcttgaacctaggaggcggaagttgcagtgagctgagatcgcacctttgcactctagcctgggcaacaagagagagactccgatttaaaaaaaaaaaaaaacaatccctggattggtagaaattgtctctgagatctgggagcattgggagcatttggtggccaatggggctcgcagatcccctgaagttggaggcaggtcactcaaatacccaacatgttgctctgcagacagccctgcacctccgggctcggcggaacttccgggacttcaggggagtgtcccgccgcactggggaggagtggctggtaacagtgcaggacacagaggcccacgtgccagatgtccacgaggaggtgctgggggttgtgcccatcaccaccctgggcccccacaactactgcgtgattctcgaccctgtcggaccggatggcaagaatcagctggggcagaagcgcgtggtcaaggtgaggtccctacacccccacagaggactgccctgggagatgtatgtcctctagtggcatgaggccctctgccttctctcctccagacgcacgttctaggaacaccttctgtgcctttgcatgcttagttcttacacacctgagacactggcccatttgattcctggcagcctctgacttacccctcagacctgaagttaattccccttctgggaaggcctcctggctacccgctgcctgagactctgaaactctgatacagtcatgcgccacttaatgatggggatacattctgagaaatagtccttagatgattttgtctttgtgcaaaagagtgcacttatgcaaacctagatggcacctagtctagatggcgtagcctgcccctaggctgccaacctgtgcagcatgtgactgtcctgaatactgcaggcagctgaacacaatggcaagtacttgtgtatctagccatagaaaaggtaaggtaaaaatacaatataaaagcttcgttataggccagcacagtggctcatacgtgtaatcccagcactttgggaggccgaggcaggtggatcacttgaggtcaggagttcgagactagcctggccaacgtggggaaaccctgtctctactaaaaatacaaaaattagccaggtgtggtggcacacacctgtaattccagttactcgggaggctgaggcacgagaatcacttgaaccctggagatcaagcctgtggtgagccgagatcgtgccactgcactctagcctgggcgatagagtgagactctcagaaaaaaaaaaaatctccattataatcttacgggaccaccatgtgcagtctgtaatggactgaactatcatgcagtgactatatttcacatctttaatatcctggtgttcactttgctttgtcatcttttgtaaaataaacctcttggtttaccctctcccaccccctacttcatcccctctctgaactatatgtgggaataccagcagttgccaaactcattctgtaaagggggctggatggtagatactccaggctccgtgagtcattgtttctgtggaagttcttcaactctgctgttatgtcaggaaagcagcttgggcactacgtaaacaagtgagtactgccatgctcctggaatagtttatctgcaaaaacaggaggcagaaaaagtagaaataggccaggcatggtggcttacatgtgtaatcccagcactttacgagtccaaagcgggtggatcgcttgaggtcaggagttagaaaccatcctggccaacatggcaaaaccctttctctactaaaaatacaaaaaaattagctgggcatggtgtcaggcacctgtaatcccagcttctctggaggctgaggcaggagaattgcttgaacccgggaggcggaggttgcagtgagccgagatcacaccactgcactccagcctgggtgacagagcaagactgtctcaaaaaaaaaaaaaaattagaaataacccaaatgtacatatataatgaatggataaaaaattgtagcatatccatacaatggaatatcattcagccataagaaagaaatggcaggccaggcgcaacagctcatgactataatcccagtgctttgggaggccgaggcaggaggattgcttgaagccaggagtttgagaccagcctgggtaacatagtgagaccccatttttacaaaaacttttaaaaattgaccaggcatggtggcacacctgtagtcccagctatttgggaggctaaagtgggaaaatcgcttgaccccaggaagtggagtgtatagtgagctatgattgtgccactgtactccagcctgaggcagtagagtgagatcctgtctctaggaaaaacaaaaaataatgacatacgtgctacaacatggataaaattgaaaatgttatgctaagtgaaagaagccagctggacgcagtggctcacgcctgtaatcctaacactttaggaggctgaggtgggcacatcacctgaggtcaggagttcaagaccagcctggccaacatggtgaagccccgtctctgttaaaatacaaaaattagctagcatgatggcgggtgcctgtaatcccagctactgctcgggaggctgagacaggagaatctcttgaacctggaagacagtagttgcagtgagccgagatcccaccactgcactccagcctgggctgctgagccgagactccatctcaaaaaaagaaaaagaaaaaagccagacatcaaagaccacatattgcatgattccatttatgtgaaatgtccagaataggtaaacacataaagaaaatagactagtggtgggtggggtaggtggggagtggcagtaacttctaggtacaggatttcttttcagggtgatgacgaaaatactctagacttaacatagcagtgatggttggacaactttgagtatactaaaacaactgaattgtgaattgtatactctagatgggaaaatttcatatgtggattatatctcaaaatttttttaagaaacaggcggtgctgggcgtggtggctcacatctataatcccagcactttggaaagctgaggtgggtagatcgcttgagtctaggactttgagaccagcttaggcagcatggcaacaccccatcatctacgaagcacacaaaaattagctgggtgtggtgatgcgcatctgtagtcccagctccttgggaggctgaggtgggaggattgcttgagcctggaaggttgaggctgcagagagctgagatcatgccactgcactatccagcctgggcaagagaggaagactatctcaaaaaaaaaaaaaaaaaaaaaaaaaggcagaatccagatttggcctgaaaaccagagtttgtcaagccctaggttacaccatctctagaaaacaaagcctgggagaaagaagaaaaaacaggttgatttttaatggtttagcttgcgtggatccaggtcctgacagttatggaatctttcaaggacacatttgaccagatgagatttggcaggcgtttgtgtagagcctcacagtccagacagtgcctcaccgtattatgatgtgggggtgggggcgggcttctggtgctcttgtcctccacacaggcctgaaacagcacaggactggggaggtaccattggaagcacccgcaaccctaaaggcactgaccctaacctcacgtctccccactagggagagaagtcttttttcctccagccaggagagcagctggaacaaggcatccaggatgtgtatgtgctgtcggagcagcaggggctgctgctgagggccctgcagcccctggaggagggggaggatgaggagaaggtctcacaccaggctggggaccactggctcatccgcggacccctggagtatgtgccatctgccaaagtggaggtggtggaggagcgccaggccatccctctagacgagaacgagggcatctatgtgcaggatgtcaagaccggaaaggtaatggctgggagtgagcagcagtgctgccacgtggccttggccttggtggcggcttcctctgggtgtgtggaagaggtgggcagggacttcagcagcatggagagccatatcaggtgggctgtctggttgggggagggcactacgtggagtgtttgccatccttctgccttaaatgtctcatttgaaatgttagaaccaaccaggtgcggtagctcacatctgtaatctcagcactttgggaggccgaggcgggcggatcacctgaggtcaggagttcaagactagcctggccaacatgggaaaccctgtctctactaaaagtacaaacattagtcaggcgtggtggtggtctgagtagtcccagatacttgggaggctgagacaggagaattgcttgaactgggaagcggaggttgcagtgagccgagatcacaccactgcacttcagccagggtgacagagtgagactctgtcaaaaaaaaatattagcatgtccactgagaggacaagtgggggtttaggacagggaccctttcccacagcagacctggtttccagcataaaggtctgatggggtggccagggaacaggaaggacctcctccctcatgcccatatcccggtggaatctttcatttttttctgcttcacctaaaaccttgaccttgatttgacctcgggccacatctccaaccttctctaagaatccaagctggaagtccagcttggaatccgagggagcatccgtgtacacagcctacttcaccatccccgaggtgccctccaaactgccccatgaaggaagattctagaaataacattgagcaccttctctatgccaagagctgtttgagctagacatgtgaagatgtcattcacccctagaccctgcaaggtagccaccgtcaagtccacttgacacatgaggaaactgaagcccaaggggtgaggtagttagcccacgatgacagggccagcagatggcaaacccggggtggagcctggcctccccgtagagaaggtgtttaacctcgtggcgcgccttccctggatgggctctgctttgggacagctgggcggatcttcctcccttccacccttacgggcagcttccctccctgtcctcgtcccaaggtgcgcgctgtgattggaagcacctacatgctgacccaggacgaagtcctgtgggagaaagagctgcctcccggggtggaggagctgctgaacaaggggcaggaccctctggcagacaggggtgagaaggacacagctaagagcctccagcccttggcgccccggaacaagacccgtgtggtcagctaccgcgtgccccacaacgctgcggtgcaggtgtacgactaccgagagaagcgagcccggtgagtgctggcagcgcagggtgtagggggtggctctccatgggtctggctctgaccctcggctgtctctgcagcgtggtcttcgggcctgagctggtgtcgctgggtcctgaggagcagttcacagtgttgtccctctcagctgggcggcccaagcgtccccatgcccgccgtgcgctctgcctgctgctggggcctgacttcttcacagacgtcatcaccatcgaaacggcggatcatgccaggctgcaactgcagctggcctacaactggtaaaaatggggacagggcatgggggtgcattcctggaatcccagcactttgggaggctgaggtgggaggatcacttgagcctaggaggtccaggctgcagtgagccttgatggccccactatactccagcctgggtgacagagcaagaccctgtttctttgttttttgtttttttagttttttggttttttggttttttggttttttttgagaccgagtttcactcttgttgcccaggctggagtgcaatggcgcgatcttggctcactgcaacccccacctcccggattcaagcgagtctcctgcctcaacctcccaagtggctaggattacaggcatgtgccaccatgcccagctagttttgtatttttagtagagatggggtttctccatgttggtcaggctggtctcgaactcctgacctcaggtgatccgcctgcctcggcttcccaaagtgctgggattacaggcatgagccactgcacccggtcaaccctgtttcaaaacaaaaaaaacaaaccgggtggcaagcagtgggtgagggttcctgctgggtgcagcctaggaaccccaagaaaaggagggtcctgctcaagtgctggtgctgggctcctcatgaaggcaggacacctcattcagtgctgaggtcaagagggaacctaggagttcacgcaaatccagggaaggcgtgggctcacctcctggggtcaggactcagggatccagtagcaggacactaccccaactaagctcccagtgagcgtgcagccaaatgcgtaactgtcgggctgttaaaagatgcatgggacacagctggcgggagtgggcagtgcaagggggcggtgagaactcaagttcagaaactgactgccctggcctgcgcccccgccctgctgtttgcagcctgtggacctggggaagggacagggtgctttcctcagtttccccatctgtaacatgaggaagacagcattttctccttcacaaggccattgaaaagatgcaatgagtgttagaacagtgcctctattggtcagagctcaatagcagctattaggattgggtgagataagtcatgtacagaaacagtgttcatgactgggtactgtggctcacacctgtgatcccagcactttgggaggctgtggcaggaggattgcttgaggccaggagtttgagaccaggctgggcaacataacaagactctgtttcaaaaaaaaaaaatttataaactagctgggcatggtggtacatgtctatagacccaactacttggaaggctgaggtgggaaaattgcctgagcccaggaatttgaggctgcagcaagctatgattgtgccaccacactccagcctggacaacagagacccacagagaccctgtctcggaggaagggaggaagggaggaagggaggaagggaggaagggaggaagggagggagggagggagggagggagggagggaggaagggaggaagggagggagggagggtcaggcgtggtggctcatgcctgtaatcacagcactttgggagactgaggcaggcagatcacttgaggtcaggagtttgagaccagcctggccaacatggtgaatccctgtctctactaaaaatacaaaaattagccaggcctggttgtgggcacctgtagtcccagcttgtagtcccagctactcaagaggctgaggcaggagaatctcttgaatccgggaggcggaggttgcagtgaacccagatcgagccactgcactccagcctgggcgacggagcaagactgtctccaaaaagaatattcaatactcccaagcatgtccctcacctcttagctgagagcagccagtgccctgatggcggcagacagctgccgacatattcccagggctgccgacatattcccaggcactacaacatcatagttaagagcacaggccccagaagcagctgcctggttcagctttctggcttgtcacatgttatatggcaagtcttgggccagccacttgacttccctggacctctacttcctcatctgtaaaatgggggtggtgatcattgccatctcatagggtggctgagtgggattaaaggagaacgtgtgttaagtttttaggaccttaccaggcatacattagcattctctattgcgagagaccctgcccggccacacaggatgggtgttgaagttcttctcggagagagttgctggctgggcgtgatcacacatgtagtcccagcactttgggaggctgaggttggggggttgcctgagcccaggagttcaagaccagcctgggcaacatggcaagaccttgtctcttctaaagagagattcctgggtgaaagcagcttccccattctgggcctgtttgttcacaggcactttgaggtgaatgaccggaaggacccccaagagacggccaagctcttttcagtgccagactttgtaggtgatgcctgcaaagccatcgcatcccgggtgcggggggccgtggcctctgtcactttcgatgacttccataagaactcagcccgcatcattcgcactgctgtctttggctttgagacctcggaagcgaagggccccgatggcatggccctgcccaggccccgggaccaggctgtcttcccccaaaacgggctggtggtcagcagtgtggacgtgcagtcagtggagcctgtggatcagaggacccgggacgccctgcaacgcagcgtccagctggccatcgagatcaccaccaactcccaggaagcggcggccaagtaagtgaggctgggagctcggctgcctataatgcccatggcaggccactgctgggaactggataacctggcatcccttgtggactgcctgctgccatccctaccctcaaagatctattccctacccaacagatcaggtgacccacttaaaatgtgaatcaggctgggcgcggtggctcatgcccgtaatcccagcactgtgagaggctgaggcaggaagatcacttgaagccaggagtttgaggctgcagtgagccatgattgcgccactgcactccagcctgggcaacaggcctgggagactgaccctgtctcaaaagaaaaaaaaaaaaaaaagcacgtatcagatgtggctcctgcagcctcccatcttgcatgtgataaaacctaaactccttcctgcagctccagccggcctcccccgatttgccttctagcctcccccttccatgctcctcgtccctggaacatgttccagctgacatgttccagccccactggcttcctctgctccttcaatgcacagcttggacccacctgaaggccttttgcaatggctattcctgctgcccagaaagcttccccccgcccctgagctcccttccaggcaggcttctccttctggcttcagcccaaagatcccctccttggggaacacttttctttctctcacagctgaatagcaccctctttgcctggtctctcccacacttgtcactgtctgaaatcctccttgtatacttgttcttttcccactcaagtggcgtgaaagtagggggccgcagtcacgcctgcatttgtccggcctagaatgacactggcttgtggcgcgtataccattctgggttgagttgcgtattgggtgccttctaggggctggggtctgtcctgggcaccggtttggttggtggccgctgcccttggcgctcctgttcctgctctggccccatgccagcctctcacctgcgctccgtctcctccaggcatgaggctcagagactggagcaggaagcccgcggccggcttgagcggcagaagatcctggaccagtcagaagccgagaaagctcgcaaggaacttttggagctggaggctctgaggtgggttgagaactagaggaggagactggcaggggccgagggtcttaggacagcagctggtgtgggcagcaggcctgggtggggtgtcgatgagacagtgcacggctacagcataagccaaggccgtggggggactgggctgtctcccgggtcttacctgactctgccttctccccagcatggccgtggagagcaccgggactgccaaggcggaggccgagtcccgtgcggaggcagcccggattgagggagaagggtccgtgctgcaggccaagctaaaagcacaggccttggccattgaaacggtgagtggggggaggcattaagaagagggtggccttgagtcctggaaaaggcccattccctacagtccctgagactgtataggacaccaggtcccccaacataaagccctatccaagtactttgcatttgcaaagtcctttgccttgtaggattcattgactccattgctggaaggtaaggattagaacacccattttgcagctgggcgctcatgcactggccaccttggcacaagtgctgtgtatgcttcataggcattatcttatttaatgcttgaaatcccattaagaggccgggtgcagtggctcacgcctgtaatcctagcactttgggaggccgaggcgggtggatcacctgaggtcaggagttcaagaccagcttggccaacatggtgaaaccccatctctactgaaaatacaaaaaattagctgggtatggtggcatgtgtctgtaaccccaactacttggtaggctgaggcaggagaattgcttgaacccaggaggtgtggaggctgcggtgagctgaggttgtgccactacactccagcctgggcaacaagagtgaaactccatctcaaaaataaagtaaataaaaataaatgtaaaaagaggcctagtgtggtgcctcaggtctctaaccccagcactttggaaagctgagatgggaggatcatttgaggtcagttcgagaccagttcaagactagcctgggcaacatagcaagacctcatctctacaaaaacaaaattttttaattgactgggtgtggtggcacatgcctgtagtcccagctacccaggaggctgaggcaggaggatcctttgagccaggagttcaaggctgcagtgagtcctgatctgcattccagcctgggtcaaaaaataaagaatgattgatttttcctcttccaggaggctgagctccagagggtccagaaggtccgagagctggaactggtctatgcccgggcccagctggagctggaggtgagcaaggctcagcagctggctgaggtggaggtgaagaagttcaagcagatgacagaggccataggccccagcaccatcagggaccttgctgtggctgggcctgagatgcaggtgagagttggggaaggtgtgttggtttcaggaccaaccttgaaaccaggaaggcagagccaaggcggaaaacacaacatctggaaagattgtggggaagggaggggtgagtgacctgacccacgatgcagggacattcacacagtgtcacgctgcatcaacgtcaggcactgtactagacccagcagtgagccagagctccggaggagacaggaaatggatgggacgccagtctgacaggcatttccaaggcagtcaagcagggtggtcagatgcaggggaggtgacccttcaaaccagctgacttaaggagggtcactctgaagtggccagggtttgacgcccatctcaacttcctcctgttctcaccctccaggtaaaactgctccagtccctgggcctgaaatcaaccctcatcaccgatggctccactcccatcaacctcttcaacacagcctttgggctgctggggatggggcccgagggtcagcccctgggcagaagggtggccagtgggcccagccctggggaggggatatccccccagtctgctcaggcccctcaagctcctggagacaaccacgtggtgcctgtactgcgctaactcctgattaatacaatggaagtttctgggcatttacaatttcaacacttttctcttgtctgacattggttggggttaccagggagcttaatggtggggaggggaggtgcccctggcatcttttttttttttttcgagctggagtcttgctctgtcacccaggctggagtgcagtggtgtgatctctgctcactgtaacctccacctcccaggttcaagtgattctcctgcctcagcctcctgagtagctgggattacaggcacgtgccaccacgcccagctaatttttgtattttttagtagagatggggtttcaccatgttggccaggctggtctcgaactcccaacctcaggtgatctacctgcctcggcctcccaaagtgctgggattacaggtgtgagccactgtgcccggtcaacatctttagatagttacaggagactcttctcctccataaaggggagaggaccccgaggcaggggaaggatgagctggaagtcacccagtaggaatgtggccccaaagccttgtgcactgggcttcctagagcccagataggggtgatgatgccacgggtgggggcatggggcccacaatggcaacatctcaccactggttctccaggagcccagctgcctggtagctctcagctgttgcagatgcaacccagcttcccattcgggaggcgccctccagcgccacctgctggagcacccacagcaccagcagacgtgtcaggcttgcacccggtgctgtgcgcttgtcccttcccaggtgggggtgtcaggttggggaggaggaccctgcctagggcagtaggaattgggcatctccttgagcttccggtctgggctgtttgggagcactgaaggaggagtgcccttatcccaccttctcccccacaaccagtatggggtcctcatttgagagaaggatccaggtgcagtcagcctgggtgcactagccctttggggccaggaacagttgtaggtgccaggcctgccccgtctctgccgaggaagtaaaaagatcccaggggccgagtgcaagagcttaggcctgtaaccccagcaccttgggaggccaaggcacaaggatcacttgagactaggagttcgagaccagcctgggcaacatagcaagacccccatctctaccaaaaaaaaaaaaaaaaaagcaaaagccagatgttatggcatgcatccgtgttcccagctactcggggggctaaggtgagaggattgcctaagcccagaagttggaggcagcagtgagctatgatcataccactgcagtccagcctgggtgacagagggagaccctgtctctataaaaaaaaacaaaacaaacaaaacccttaaagcctccctaaagccctcattttcaccttcctgtaatattgagtggaaaaagcccgatccccccttaaaccacctccctccctctctgccctgcccctgaccgttgctgcaggaggaacaccccacggagctgactgatcttattttaaactcatgggaacaaattttgagggaggtgcagcttctctggctgtgctgctctgtcttgtgtgcgatccgctttgagacaaccattcacaccacctctcctctcagcctcctacacccctgcccactttctctcacctctttgagaaaatagaagcaaattgggtaggaaggcccttcccagcaacaaacctaacaaactgctggcatctagactgtcctccctcctcttcccaccctgggctcctccccttgggctctaggagagagggctgcattccttcactgattgccgtcctctcctgtgctgtcaatttttttttcttttttttttttttcttgagactgagtctcgctctgtcacccaggttggagtgcagtggcgtgatctcagctcactgcaacctctgcctcctggattcaagtgattctcctgcctcagcctcccgagttgctgggactacagtcatgcaccaccatgccctgctaatttttgtatttttggtagacatggggttttgccatcttgtccagactgatcatgaacccctgacctcatgatctgcctgccttggccccccaaagggctgggataacaggtgtgagccactgtacccagctgatatgccatcaatttcttctctcctgcatcatcatcatcaggatatagacatgtctactctgtccatataaaacaactcccttaaccctatgagcccctctaacttccacctctcctttttccatcacagccaaatttttccagagttctctgtggtctcactttccattcctcatctctcattatctcttcaaaccactccagatagggccaaacgtggtggctcacgcctgtaatcccagcactttgggaggccgaggtgggtagatcacctgaggtcgggagttcaagaccagcctggccgacatggtgaaaccctgtctctactaaaaatacaaaagtgagccaggtgtggtggtgggtgcctgtaatcccagctactcggcaggctgacggaggagaatcgcttgaacctgggaggcagaggttgtagtgagcgagattgcgccattgtactccagcctgggcaacaaaagcaaaactccgactcaaaaaaacaccccagtttgcttctgtctctgccccttactttatggaaactgctttattcggcatcaccagtaatgtcccgttgctaaatccagtagttgatcggtcacttggcacagttggccattcctcccatgctgggctttcctgacatcacctgttctagttttctttctcgcttctctcagtaggttccctaaggcccacttctcatgctgacattcttgtccaatcgcatgacctcagatggtctctataccactgacctcagaatccattactccagctccgacctcacccaagagctctggactcatttccaatccatgccttgatgtctccacgtggacctcaattggtgatcaggctttggctcttgccaatgaaatgcaaggggaaatgacatcacatgcctgttcttcccttttccatataaatgggtgaccagcaatgttccaagtggaagctgctccaaccacctgggtcccagggagaaaatggcatgaggtgcagccacagctgacctgcaacagacatgtggcaggagtgagaaatgtttgctgtattaagcaacggagatttggggggttttgttaccacagtataacctagcctatcctgactactttgtgtgcctcacaggattgtaagatctcataggtcataggggaaactcctctaaattgtatgcaaggggccaggtgcagtggctcacgcctgttatcccagcactttgggaggccgaggtgggtggatcacctgaggttgggagttcaagaccagcctggccaacatggtgaaaccccgtctctactaaaaatacaaaaaaaaaaaaaaaaacacaaaaaaaactaggcgtggtggcacacgtctgtaattccagctactcaggaggctgaggcaggagaatcgtttgaaccccggaggtggaggctgcagtctgccgagatcgtgctactgcactccagcctgggagagggcaaaactccatcttaaaaaaaaaaaaaaaaaattatatgcacgaagaggggcccagcacaggccatagagtggggaagacaggacttgctggaaatacagtgagcttctgtctccaaaaaaaaaaaaaaaaaaaaaaattagattaatttttttttaactttacatttttaaaattttaattattaggtttaacctcaaatttttttttttttttttttttgagacagggtcttgctctggcttggtggttaaatattttgaatttcatccctggggcttagggttgccccaagcaacctgtttactgaaagaagcctgaaatatacattgaatttttttttctttttagacagagtctcgctttgtcgcccaggctggagtgcagtggcatgatctcggctcactgcaacctctgcttcccaggttcgagcaattctcctacctcagcctcctgagtagcgagaattacaggcgtgtgccaccacgcctggctaatttttgtattttttgagacagagttttgctactgttgcccaggctggagtgcaatggcacaatcccggctcactgcaacctctgcttcctgggttcaagcgattctcctgcctcagcctcccaggtagctgggattacaggtgcctgccgccacacccaggtaatttttgtatttttagtagagatgaggtttcaccatgttggccaggctggtcttgaactcctgacctcaggtgatctgcccgccttggcctcccaaagtgctggggttacaggcatgagccacagcgcctggccctagttttttatatcttaaaaattaggcctatgtctaatccaaaaaaagtgtttttagattaaattagctaggtgtggtggcatgtgcctgtagtcccagctactcaggaggctgaagtaggaggatcacttgagctcaggaatttgaggctgcagtgagctatgacggcatcactgtactccagcctgggcaacagagtgagaccctgtctcaaaaacatacatagagaacagtgtgatctctgaagaagttcaacacagcctgtttttctctagcactagaacaaatggcttttctttggttgaataccaaagtaattgatgtgttgaaggaccccctttataagaaaaatctgtgtctttcaacagcgaacacattcagcatggtaagatgctgtttaccgaatcagtttcctcttccacttacgcccacaactaatctgtgtcccagcttcccttgtcctcagacactgccgtgtgaccgagttgtagccaatggaatggaagtggaagtaataagtgctaatttcctgtctttccataaaaacttggctcctgcaacctccatacacatcatctgcctacatgatgcaaacaagctgggcagtcccaggagccacgtgttgaaaatggcagaatcacagaacaggagatgcccgaattcctgaatcgccgcttgcaggagagctgtctcccagtcggcagcatctgattaagatttaatatgagttagaaataaaataatgttctttcttttttttttttttttttgagacagagtcttgctctgcctccaggctggagtgcagtggcacggtctcggctcactgcaacttccgcctcctggttcaagtgattctcctgcctcagcctcccgagtagctgggactacaggcgtgcaccaccacacccagttaatttttgtattttttgtagaaatgaggtttcaccatgttggccaggctggtctcgaactcctgacctcaggtgatcccccacctcagcctcccaaaatgctgggattataggtgtgagccaccacgcctggccaactctttaactcttttgtagcaatggggacttgctatgttacccaggctagtctcaagctcctgacctcaagtaatcctcctgtttcagcctcccaaagtgctgggattacaggcatgtgccaccacaaccagtctagaaataaactatcatgtttgaggcactacacatcttgaagtttgttacagtagttagggttatttttaatcacagaaggagagccttgaagactgagactgcctagaggaacagcaaatgtacaggtactgatctcctgccctccgaggcgcagtcattgagtggaacaaacaaatgaaacttcttacacagtggcgtggtgatcattcatttattctgaaggcatatagctgattccagaaggctattactgcacatataacgtgactccactatgttccctagatcaaatatagatactccagggcccaggtcagctcagcctttccccactccccacctccagatcaagggctctgcaggttcttcctgagcccaggccagccactggacatggaacgccggcaccagtctgactgcgagccacgtccctgtaggccaaggggacttagaagccctcctgtgagtcttcagtgctaccctacaagcctcaggatgctcgggtgcagattcttttagactgcccgtgctcacactctcctcctcaactctcttttttaagatcacatatggccaggtgcaatggctcacgcctacaatcccaccactttaggaggccgaggcgggtggattacctgaagtcaggagttcgagaccagcctggccaacatggagaaaccccatctctactaaaaatactaaattagccgggcgcggtggcgggtgcctgtaatcccagctactcaggaggctgaggaaggagaattgcttgaaccccaggggcagagattgtagtgagccgagattgcaccactttactccagcctgggctaaagagtgaaacttctgtctcaaaaaaaaaaaaaaaatcacatatggccaggcatggtggttcatgcctgtaattgcagcactttgggaggttgaggtgggaggatcacttgagcccaggaattcaagaccaacctgggcaacataaggataccccatctctacaaaaaaatacaaaaatagtgtgctgggggtggtggtgccgcctgtagtcccagctactcaagaggctgaggctggaggatcacttgagcccaggaggcagatgttgtgatgagtcgagatggagctactgcactgcaacctgggtgacagagtgagaccttgtctcaaaacaaaacaactcaatgtagctggatttacacagtcagccttctgatgtcactgtaaatggttagagccaaggagcctaggagccagccagggacatgggagtcaggcaggccaagggctctgtcctctggggctggagagagaggacccaccaggctggaggaagagccaacaggaaggagaaagggctgcagggcaggcacagggacagcccctgacccagtctcctaccttgactgcagcaggccaggtagtggggtgcccacagctggaaacgcacctcagttttttgttttttgttcttttgagacggagactcatctgtcgccaggctggagtgcagtagcacaatcttggttcactgcaacctctgcctcccaggttcaggcgattttcctgtctcagcctcccgagtagctggaactacagtaggcgcgtgccaccacacccaggtaatttttagtagagacagggtttcaccgtgttagccagggtggtctctatctcctgacctcgtgatctgcccaccttggcctcccaaagtgctgggattacaggcgtgagccaccacacccaccgcacctcagttttgtgcaccaatagcttcttcaagcacaggtctgtccctgccactgtcctgctttaagcccctcaacgttcatcctatacgtgtcccccaaaaagcgcgagatgatttaccgcagcaccattcacagtggtaggaccaggttaaactgaatttttttttgagacagagtctcactctgtcacctaggctggagtgcagtggtgcgatctcagctcactgcaacctctgcctcccgggttcaagcgatcctcctgcctcagcctcccgagtagctgggattacaggcgcctgccaccacgcctggcgttctatgcaaccattcagaagcccgctggcgtgaaagtactgcgtacaattaagtgttcaggtacaggctctggaaccagactggccaggctgccacctctcggggcctgtttcctctctggggaatgagaacagtaacagggctgtcgtattgtgtgcaactgtacaattgtgagataagataatgcacgcaaatagcacttagagcagggtagcttgtgttagcagaacagcacatacataaaatgaatgttaagatatggaaatgggctagacacagtggctcacacctgtaattctagcgctttgagaagccaaagcaggaggatcacttgaggccaggagtttgagaccaacctgtgcaacacagtgatacccccatctctacagaaaaacataaaaattagccgggcatggtggtgcatgcctgtagtcccagctgttcagcaggctgaggcaggaggactgcttgagcctgagaggtcgaggctgcagtgagctatgatcatgccactgcactccagcccaggtgacagagagagaccctgtctccacagtaaaattttaaaaagtcctctgggctcctaggccgccccagctggcttctgcgtcgcctctcaccagctctcccagcccccaacccccactcccccaacctccctggagcacttggtgctccaggccctgtgacctagatctgtttcttttttttttccccaccttgactggagcaggccaggttggcagggatggtaggggtgcctgatgcgcttgaaacacacctgctttgtgcacaattttttttttttttttttagacggagtctcgctctgtcactgggctagagtacagtggcatgatcttggcttactgcaacctccacctcctgggttcaagcaattctcccacctcagcttcctgcgtagctgggactacaggcgtgcaccaccacacctggctaatttttgtattttttgtagagatggggtttcaccatgttggccaggctagtctttaactcctgacctcaaatgatccacccccttgggtggatcccagagttctgggattacaggtgtgagccactgtgcccggcctagatctgttccaatttctgttgtcactgtaaatggttagaaccaaggagcccaggagccagtcagggatgtgggacccaggccgaccaagggctccgtgctctggggctggagagtgctcagaggacccaccatgccggaagaagagctgacaggaaggagaaagaggtgcagagcccaggggcctctctggcctccctgccttcccatgccattccctcagctaagaaccaatctcctctgcactaaccctttcctctccaatccctaccagccttctacatgggatacccagccccttcaccaaaccctaaatcaggtcctaggtgtcttctactcccacccccaacgagcactttcctatgttattgtagaggaagccagctgcccagtacccagtgaatcccctgggcctagcacaggagttgaggctcagtacatgtctggtaaatttctgctctcctggacacgggggcctcttgggccacttggctaagctatcatgcagatagaatgagtaacatctgcaaagaacccgcagcacagagtctggcatgcggtacagtagtttaaaaaccacagatggcaggggatagatgcccagaacagtgcctagtatatgataggagcccataaaaagagggaacagtgtttctcaacattactggaagaattccccggcattcaagttgcaggtttctgagcccatccctagagcttctaactctgaaggttggctgcagggtccaagaagttgcatttattttattttttgagacatcttgttttgtcgtccaggccggagtacagtagcatgatcatgactcactgcagccttgacttcccaggctcattcaatcctttcactgcagcctccccagtagctgggactaaggcacacaccaccacacttggctaatttttgtatttttttttttgtagagacggggtcctgccatgtgacccaggctggtcttgaactcctggactcaagtgatcttcccacctcagcctcccaaagtgctgggattacaggccaggcgtgagcctccaagacgggccaaagttgcttttttttttttttgagactgcctggctctgcctcccaggctggagtggcaccattacggatcactgcaacctctccctcctgcctcccaggctcaagccatcctcccacctcagcctcctgagtagctgggaccacaggcatgtgccaccacatttggctatttttgttattttttgtagagatggggtttcaccatgttggtcaggctggcctcgaactcctgtactaaatccacccaaccttggccttccaaaatgctgggattacaggcatgagccaccacacctggcttgaatttgcattttaaagaaatatccagccaggctttgtggctcatgcctgtaatcccagcactttgagaggctaaggtgggaggatcacttgaggtcaggagtttggggctgcagtgagctatgattgcaccactgcactccagcttggacgacagagtaggactctgtctctaaaaaaaaaaaaaaaaaaaaagaaagaaaagcaaaaaagagaaatagaaatataccacaggtggtctaaggaccacactctgagaaaccaactcattgacagacgagtatttattaagcagctactatatgccaggttcaagttggtcttactctagggatagagaagagaacaagaaaagtctgtgccttcatggagtttacattctagtgagggtagaaaatatcaagaatataaatacatgtagacagtcagtgacatcaaacaagtgggcggtggggacaccacatgagcatgggtggcaggagggcctctctgtgaggtcactgtgggtagacggagaagccagccagcaaactggaggaaaagcacccagacggacgtccttccctaagctccctcaacccaggccctgagccaagaatatctgaaaggaaaccaagtcaaatagtgaagtcccgccaggaccagggtaggcaggacagaggagccggtgacagggaaggctgtggatggcttcttccctcctgggcatggtgccccaagcttgctctggctgggggcggaggtctgactcccgcctttcaggaaacctggccctcacaccacctccctcactcaagcgtccctagcatctcggaccccaggactgagcaggcagggtgtgacactgcccggtcccggcaccccaggagcaccgcctggatggagggggcctcccgcgtatcctccctgatttgaggcccgggtcctcaggatcccagagaacgtgacgtcaccaaagagaggctgacccccatcccagcaggtagaacaacacatgaggaaggcgtgagactgggacctcctagcagggggtggggagctgtgtggcacagcaagactcccagggcaggtgggcagccaggacccggggctccagcgtcacttcttcttggcgcggtctgctgcgtccagggcagccatgttgcgggcggccgtgatcaggtggatgacgctgatgagcgacttcagcaaggcgatgggggcagtgacccagaggcccatccggaacagtcccacagagccaactgcaggaaggcagcaggggagtttggggcccgaaggagggggcctccatctccctgggcaggccagatccccctcccatcctcctgcccagcccctcatctcctacctaaaggtccctcagagaaatggaacaggtagaggaggcagtagaagagctcattcccagcacacaaggtgaacagagcaggctgcacacacagcaaacaggccacgttagcaagaggcaggcgtgtgccaccccctgcccccccagcactaatgaaggcacaatctcggcatattacttctcttatttttttttcttttttacagacagggtctcgctctctcatccaggttggaatgcagtagtatgatcatagcactgcagcctcaaaactcctggtctcagccaggcgtgtggctcatgcctggagtcccagcactttgggaggctgagacaggcggatcacctgaggtcaggagtttgggaccagcctggccaacgtggcgaaacccctctctactaacaatacaaaaattagccgagtgtggtggcacgtgccggtagtcccagccactcaggaggctgaggcacaagaatcgcttgaacccagcaggcagaggttgcagtgagccgataacccgccactgaactccagcctgggtgacagagcaggactctgtctcaaaaaaataaataaataaataaataaacccttggtctcacgcaatccttccaccttagcctcctaagtagagactacaggcgtgtaccactgtgcctggctaagctaattcaagattttgtgtgtgtgtggaaacagagtctcactttgttgcccaggctggtctcaaactcctggcctcaagcaatcctcccacctcagcctcccaaagcgctgggattacaggcatgagccaccatgcccagccattatctttttaaaaatccttccagaggctgcctgtgttcctggaatcaagtccacactccagccctgcagacctctctggcttatctcccttcccgctttcagtcccttctctttgcaggcctcattcccacttgttccctggagtaattcacacaggccttccccaccaatcctcctcctccacgcctcagcttacgggccctcctcctggagtgactgggcaggccctgctctgcgccctcgccttctcctaggctaggaccaggattcagcccagggcttcccacagccaagagcctgaggggtggggtgtgcaggaaatgcttaccctcgaggtgtagtagatccgaagcaccggattcccggacaagtcgatcatcttgtgactctcactgcctcggaccacagaacttggggagaaaacaggggaacccacaaggtttcatgaccactaccatgcatccaatcctcatgttaacacctattgtacagatggaaaactgggcacggctaaggaccagtatcctgccgaaagccacagttacctatttgggggcagagtcaggattcaaatgccacatttgaaagctcccatgccccttcctataagctgtcacctatatggaatcctagaatacccagccagaagagtcctaagaattgcttaatgcaactgtaaacatgactgaagctttaaagagaggcaggtttgcctggggtctttctacaaagcagagctaaaaaggagcccttccaggatgcctagtgccatcccagacacccttccgtctaggctcagcccaccccactgtaatgtctccaagtggcccaggcccccagaatcgcagcagacctgtggaggtgcagccagtgactggccacatccaaactcatgctgatttggaagaacagcgtggctccagggtacagcagggccaggttgaccaacaggcacatggtggagcagcggtccgtcagcatgtccagcatggccccaaaccgggttcctggaagattaggtgggcaagggctgttatggcacagtggatgcaggacaggtgcccatatttggtttatcactctgacgcagggtgtaaacgaagactggaagtgtccgcctgcctggggaggaacgcaggctagaaaacaggctgtgtgtgaggtcagtgggcaaaggtcaccatggcatgaactgagaaaggcatgagagtggagggaacagggtaggaggagaggaaagctatgtctgcaactcatcaaccccagaaccaagactccagggctagatagagacttgatgcctcaggggaagccttacagttgggtctggagaacagattaaaaaattagtcaaccctccagaagccatcacccttccctctccatcctccctctaagcatgccttctggaaccccaactgcttatgcagggcacacagtaggcctccagtaaacacctgttgaatacactgttttttgttttttgtttttttttttccgagacagagtcttgctctgtcgcccaggctggagtgcaatggcgcaatcttggctcactgcaacctccgcctcccgggttcaagcaattctcctgccttagcctcccgagtagctgggattacaggcacgcgtcaccaagcccgctaatttttgtatttttagtagagacagggtttcaccatgttggccaggctggtctcgaactcctgaactcgtgatccacccacctcggcctcccaaagtgctgggattacaggcgtgagccaccgcccctggcctgaatggacttgtattcagagagacctccagcagcgccaccgccatgtcatgtcttgctaatccacacctctcacaagcagtgagttctcaagagctagcttaaattccttttgctacaaaatcagtccattcttgctgggcgcggcactttgggagcaaggcaggaggatcgcttgaggctaggagctggggaccaatctgggcgacactgcaagacccagtctctacaaaaatttaaaaattagccgggtgtggtggcacgctcctgtagtcccagctagtcaggaggctgaggtgggaggattacttgagcccagaagatgggggctgcagtgagccatgatcgcgccactgcactccagcctaagtgacagagcgagaccctgtctcaaaaacaaaaaaacaaaacacaaaacaaaaagccccaggccatcctgttctgctttttccagagatgggaatgacagccctctgactctgaggtcccgaggaggcaggggaagggaggaggggattgttgaaccccaaggctggctgagaggggtgtctgtcaccttgattaagagcgcgagcagcgtgtccatcgaaagcgtccagcaggccgctgagcaggtagaaggaggaggccgtgagggggcagcagggcatgaagtagaaagaaatgatggcgaagacaatccgggcataaccttggaacgggacgcggggagacagggcaggatcagggagcccgccaaggcccctcgccctctcgttcggcccggggccgtgggcagcactcaccgatgaggttgggcacgaacaggaagatattttcgtctggcatcgcggcgcctcccttgctgccccgggcctgctctggagatgccagtgctgtcccagccccgcagcgcggcctcagcctccggcccggcgcatcggccgcaccacctgcgccctggaccccgccgccccaacctggccccagatgctgaagcccgcagccgtcgggagcatggaccggccccgaggtgcgcgggacgcagggggcgcgcgcagtccgcccttcctacccgcaacctccctcgcctctgccagccccgcaggcgctccgggcctccagctgcggtcgccgctgctccagctgcgcgtggcttccgggaacctcctcctccgcgcccgtcgttgcaaaattggagagaggaaaaagtggcttaaaaaaatagttgcggcccctttaaggcctgtcggcttcctttcccttttcctccctccgcccctctcccttggctcgtaccaaagcgcagaggaggagagggaggaaggaaccattaacgtcaagcaaagttagaaacggaaaaggaaagggtaaaagagaagaccgaataaaaatctctgctttccttttgtggagggtatgacttcctggaggcaaagataaggcgataaaattcctcctcctgagtctttgcgtccccaagaggccaggagatttggtgcagtcctcactttactccccgccccctaagtctccagccgcctttgctctcgcaggctctaggcggctagagaggctccagagcgccctgcagatgggttgcttttcgcgtgccccttgtgatgggaggattaggtcgcaggctccaccctacgtcatcctcccaagcttctcaagcgtctggcgcttggggtcactgccctcaaggaggcacctggaggggtacggaggggaggctggaggagcaaacggggcgcgctaggaaattcctctgtctttagttctagaacccctgatctcctagcaacgaggctgcggaacctctgcagactccaagggttttatagcgtccggtagcgacacggagccggctcccccttttccagccttcctccccatctcccattctccatcccccacgacctataccagaggtccttaggcctccacgtctctccttttgccgagtagcccaaggtttccacccatctgccaggtctggggcgtcaagtcggctgcctcggcttgggaaggtgcttgggagggaagaaggaaggagaggcccaccaggcgaaggggtgaggggtagggggttgcgggagttccctctcactcccgaagatataaagcaacctttattattattattattttttcttgtgagagggaatgaggcagcgggatgtttcctctaaaggccttgtttaaacctgggcccggggaatggtggtggactgggttctgggggaaagcgggctggtttctcaggtcaactcaggcttcgactgttcccagggggatggcgtccactccgatggggaatgagggggagaagaagagcagctggccatctcaagctgcaccctccttgagaggaggtccggtgagcactgcagggaaccctagaggtgggaatgtaatgaagtgaaagcctcccaggcagaggcaccccgtgccaggtctgagccacgggccctgagactctagcctcaaccctgagtcctgaagccccgactcatagctctcagcactaggccctgactctaaacccccaccaaacccccctcccccaggtccagagctttctagctaaatctcaaggcccagtccttcaggagcaagctccttggacccacaggccccagcctgggaactcccacagccagcactcccatgtgggagctcccaggctgaacccctccggcttttcctttcccaggcttcgttatctcgttctgaggaatacctgtcccagatcagtgcagaactcatggaggaggctttgtgcactgcttgctgccacttgaaccctgtgcccatcaaaaaaaagcagtcacaagaccaagcgactcagatatccaaacgcggtaaccccctgcctcaggaccaccgtgtctagagaaccgctgcccccactatgcctggttacagtccctgacccctcccacccctagctgaactctccaggagtctgtgcccatctcatccatctcacagccagccctaggacctgtgaaatgcccctctcacccgctaacccagtacccactcctcactgctggccgagaatccccttagccccgtctgccctggccgcatctcttctggccacggggatagtcctttctctgactaggtcctctacttccagcattcttcaccaagacctgaggcacagacacctggtgagtgaggcttcaagggagatgctctttgtcctgggagagaggtgaggaacctggaggggagagagtgagggtttcacaatatcccagcagggtgggggaatttttgaaccgtgcacttccattctattctgccctgatcctcaaattctgaattctcagccctctcccctctcttccaccatctcctgctcggacagaaaccgtacctgcagcaaggcatacctcctgccaactcctggtgaaaaggtacatgcagggtccatggctgccaaggctattcgatattaaccaaaccttttgagtttgcactatatgttggtccctgtcttaggagcttgggacactgaaatgaatggtacagtctcagcccttgaagagttcacagttcagtgtggggacagacaaggaaatggccaattataatacagtctggataagtttccataatagaaatggacacagtgggatagtactcttatcccagcttcaattggacaggaaggacaggagccatggagcttcttctttttttttttgagacggagtcttgctctgttgcccaggctggagtgcagtggtgtgatctcagctcactgcaagctccacctcctgggttcacgccattctcctgcctcagcctcccaagtagctgggactacaggcacccgccaccacacccgactaatttttttgtatttttagtagagacggggtttcaccgtgttagccaggatggtcttgatctcctgacctcatgatccgccctccttggcctcccatagtgttgggattacaggctttggagcttcttgaaggaggtagcacctaaagaaataattttccaccaggtgcagtggctcacacctgtaatcccagcatttttgggaggctgaggtgggctgatcacttcagggcaggagtttgagaccagcctggtcaacatggtgacagaggttgcagtgagctgagatcataccactgcactccagcctgggcgacagtgagaccatctcaaaaaaaaaaagaaataattttccaggttaaaaaaaaaagaggttagtaggagtctttcaagcagttggggttgcatgaacaaaggcaaagagcagtcttcgcagagccagtgtgagcatctgtgtgtatttagggcagggagaagcagtttagcagctggagtctacaggcaaggtaagaggggactcaagagactttatgtgccttgtttagagccttacacactttcctggctgggtgtggtcgcttatgcctgtaatcccagcactttgggaagctgaagcaggaggatcgcttgcgtccaggagtttgagaccagcctgggcaacatggtgataccccaggcatgatggcatgtgcctgtgatcccagttacttgggaggtgggaggatcgcttgagcccaggagttcaagaatagcctgggcaacatagagagaccccatctctataaaaagttaaaaaaattagccaggtgtggtggcacgaacctgtggtctcagctacttgagaggcggaggccagaggatcacttgagcctaggaggttgaggctgcagtgaaccatgttcatgccaccgcattccagcctgagtgacagtgcaagaccctgtctcaaaaagaaaaatttaaaaaaaagaaaagaaagaaagaaatagtaggaggagctgggtgcggtggctcatacctgtaatcccagcactttgggaggccaaggcgggtggatcatgaggtcaggagttcaagatcagcctggccaacatagtgaaaccttgtcttaactaaaaatacaaacgttaggtcaggcgcggtggctcacacctgtaatctcagcactttgggaggcccaggcgggcagatcacctgaggtcaggagtttgagaccagcctggccaacatggggaaaccctgtctctactaaaaatacaaaaattagctgggttggtggtatgcacctctaatcccagctactcaggaggctgaggcaggagaatcgcttgaacccaggagttggaggttgcagtgagccgagatcacaccactgcactccagcctgggctgcagagcaagactctttctcaaaaaaaaaaaaaaaaaaaaaagccaggcattgtgtcacgcacctgtaatcccagctacttgagaagctgaggcagagacttgattgaacccgggaggtggaggttgcagtgagctgagattgcaccactgcactccagcctgggccacagatcgagactctgtctccaaaaaattaaataaataaaaattaagcacttactatgtgccagcactgctcgaggggctggggtgttgcagtgaacgaaacagagttcctgctatcaagaggtttaaaaaattagccgggtatggtggtgcacagctgtggtcccagctactcgggaggctgaggtgggaggatcattggagcccaggttgaggctgcaggaagatatgattacaccactgcactctagcctggctgacagagggagacctgtctcgagaaaaataaaaaagacatgagccttgggtctaaagagtgaaaaggctctgtctcttttatggagctcttcctaacagtcagtttggaagatgagcccacccctctttgatgctcttggcttctcatgcctccccctttttgtccctagaacatgcctcaaaactactcttttgccactcgttaaccacttccgtttgtggggacctcctggtcatgagcagcatcatcccgaagccttcaaagtgttctggattcatcacaggaccctccagcctcagccagcaaggataccaccaggaatgaaagtgctttaataaagagacagggtgtgcattgctcatgtgtggtttctctggggtagagaagcaggacgggggggcttttatttttttttctagatgtgggtgctggatgtgggcatacgattggagtgtttagtctttaaaaaaatttttttgtggccaggcacggtggcttacgcctgtaatcccagcacagatcatgagctgaggatatcaagaccatcctggccaacacggtgaaaccctgtctgtactaaaaatacaaaaaattagccgggcatggtggcacgtgcctgtagtccgagctactcgggagggaggctgtggcaggagaatcacttgaacctgggaggcggaggttgcagtgagctgagatcgcaccactgcactccagcctgggcgacagaacgagactccgtctcaaaatttttttgtgtgtgtggagacggtgtctcactgtgttgcccagactagtcttgaactcctggcctcaaatgatcctcctgcctcggcttcccaaagtgctgggattactggtgtgaaccaccacacccggcctgttgacacagatgagctcatgggtccaaatccagcctcctggccacacgccagcaccttaaggtctaggtctgtggcatctggcaggactcctcttgcttctgaggagccacctctgccaccaccattggggatggggacactgagctatggccttgcccctctgagctttgggcttcatgcctgtgagaacatatcacactcattactagccagaaagcagtgcagtaggctttgcagtaggctaaattcattttagcatttagcatttgcattgctaaatgcaaactgcacaaagtttggccatttattggagcctcctgtggaagtcaattctcatctctgagccttagtttccttatctgaaaaaatggattaataaatgatccctgtcccgtagggtcctttagagagttaaaagacataattgagtcaggcatggtggctcatgcctgtaatcccagagacacaccggacagtatggcgggaggatcgcttgaggacaggagttcaagaccagtttgggtaacagagtgaacccccacccctaaaaaggtaaacaagttagccaggtgtggtggagcacatctgtagtcccagctgctcaggaggctaaggctggaggatcacttgagcccaggaggttgaggctgcagtgaactatgatggtgccactgtactccagcctacactacagagacaccgtctctaaagaaaaaaacataggccgggcgtggtgactcatgcctgtaatcccagcacttgggaggctgaggcgggtggatcacttgaggtcaggagttcgagaccagcctagccaacatagtgaaaccccgtctctaataaaataaaaaaattaaccgggtgtggtggcaggctcctgtaatcccagttactggggaggctgaggcaggagaatcacttgaacccagtaggcagaggttgcaatgagctgagattgcaccactacactccagcctgggtgacagagtaagactcagtcgcaaaaaaaaaaaaaaaaaaaaaagacaaaaaaacaacataatgcatacaaagtgcttgctattattgagatcagtttgcctcacattctcctaaaagtccacccctttctgaatatttcagcatcctttcaagtatcctaaaaatgtttaattgcatttaaatataaaattttattttatttgggacggagtctggctctgtcgcccaggctggagtgcagtggcgcaatctcggctcactgccagctccgcctcctgggttcacgccattctcctgcctcagcctcccaagtagctgggattacaggcgcccgccactacgcccagctaattttttgtatttttagtagagaagggatttcaccatgttagccaggatggtctcgatctcctgacctcgtaatccgcccgcctcggcctcccaaagtgctgggattacaggcgtgagccaccatgcccggcttaaatataaaattttaattaggccaggcaaggtggctcacacctgtaatcccagcactttgggaggcccaggcaggcagatcacctgaggtcaggagttcgagaccagcctggccaacatggcaaaacccggtctctactaaaaatacaaaaattaaccaggcatgggtgcctgtaatcctagctactcgaaaggctgaggcaggagaatggcttgaacccaggaggtggaggttgcagtgagccaagatcacgccattgtactgcagcctgagtgacaagagtgaaaaaaaaaaaaaaaaaagataaagtggaaaaggacacccccaaggatataaaacaagttcaaattggtagatgggtcacagcagatacgcctaaaatactaaaaagattgggggggggggaagaaatggtgtacttgaatggatacaaaaattctccaaagggggtgaattttaggcaaactggtcataagacaaattgaaaagccaggcttggtggctcacgcctgtaatcccagaactttgggaagttgaggaaggaggattgcttgaggccaggtgttcgagaccagcccgggcagcgtaacaagatctcatttctacaaaaaatttaaaaattaggcaggcaccatggcttgcacctgtagtcccagctactcaggatgctgaggcgggaggatcccttgaacctaggagtttgaggttgcagtgagctgtgatggcaccactgcattccagcctggccggcagagccaggccctgtctctaaaaagaaagaaattgaaagctgtttgcctcctgcccagcagcgagagaagacgggtggctcctgtcagttctctcccatctggaagaggcccacaatgtcaaggaaggcctggtggagaggtcactgcgtcctggagtgaggctggtcgcagggaggccttcacagaggctgagcctaaagccaggcttttttacctcaggccaggcccccggacactgccctctgcccactttcgcatttcctttttttttttttttttcaaattgttcccctttccccagccctctctccagagaagtggtccagtgctcggtgaccacctccccacactccaccggcccaattacaagtggcgattttctgtttattgctcaaaaacaagaattcagaagcaaaggtggagagactgtgggttggggagatggcaggaagggggcaaggccttgtcccagctctcccctttgtccttcttctgaccctcctggccggagtcaggcctagggccagggcatctgggaggggggcaccttcgtggccaagggaacagtagagctatcgggggcagtccttgaggggtgccctgggcaggaggggctgcaagatttgcagggaggcagagttcccctcccagaatccaaaagccggtagggcggggggcaggcccctcgtttggcaactgagaagaggcggctttgggcggcaggatgctggtttatttactgtaggatctccagggccatcaaagccccctcgtgggatagggagactatttacacagccagggaggagggcagccaggaggcagagaccgggtcccgtatttccctctgcccgaatgaggaggggaggggcgtcctgggtcctgcagctgtagtcttggggttcagatggaaacttcatactcccgcgtatcctgaagacagagagatcaggtcagttgttggagtctgataggggtggaagaggcagccgaatgggaggaggggcaacgatcctgggttttaaagtaacattgacctctaggggctggggggccagtgaatgtgtttggttcatcctacggtgtcgtaaaatgacacaaaaatctgaatttctggcttgtcttgaataattggaagatctgccaattgtgcctcagtttcgactatggggtagagccgtattcttgagatggggcacaagtcctccacttagccacagtcctcaccactccctattgtatacacatggcttgctatgctcattgacatggcctctgggggcagctgagtttgaaattcccaagacagagattccagagaccttgcgagaaggttatggagtcctgggagagccaagtggtggctcttcaggggcaggcaaggtgcttaccccagcttcatacagcgggttgctgaagtccgactccacggtgatggggctgtaggagtgggagcccgagaagccgaaaagggactttccctgaagcctgggaaagggagaggacagaggagcttatcaacaggtaagcccctgagctcccctgacccaggctccagtgccaggctcgcaagacgtctgccctggccggcagtccccaagcaggctacttacttggtgtagtagatgtaaacgccactgccgaggacaatgaccaagcctagaggcagcaggatggccagggccaggttccccccttccagctgccgtgatggatctgtggtctgggtcactacaggaggaggagaggccggtgagctgtggctgggcccggtcctgggctctcccagcctcctgccctgggcctcaaaccctgggcttcatccctccaaggcctggcctcctgccccagcctctgccttgccctcccaacctggccagcctgggtctccacctgtgctctcactgaccttccagttttcggttgtccaggagctcctcataggcaactgcagggagaggagggggaggggatggggtctgagccagggaggggaggaggctgggaggggccgggagcccggtggggctgggctggacagcctggttctctctgccctctgctcaacctcaactttctccctttgtggggaagagagaggagtgaccagcacagggcctttgtcctctttctccagacccctaaaaagtcagggttcctggacagtctgagccaaactagaacttgtcagcgatagggaaactgaggcctattcagagcaagggacttccaagccaaggccccctctactacacccctgagccaatcccatgacctcacacgacccagggcttctggacacacccgtgaggacacgaggccacaggaggagaaccgggagctctgtggggtcgcccattggtctcaaatgtgctacctgactctcccagccctgtcacttcccggacactggtgtgcccctcctgccctgtctggccaggcacctttgcagagtgggggctggctggtccactgggaggggtggccgggcacacaggtgatggtgacctcgccgataagctcaaagccctcatagcagaagaagcgcagagactcgcccgcctggtagtggtgcttgtacagcgtctggtagccattctcgggaacccccgggttcaggcacggctcgtacttcactgcggggagcatgccagtcacgtgccagctgcactactgtgcacggggcagacgggctctcccagggctacccagccaccctcccagggtgtgccccagactcacaggcgcatttggggaccctatcgctccacttgggtgtgcctgtgtcccggctgtagcaggtgagcatggctgccccctcgaggctgtaccctggcaggcagcggtactggacgtgggagccaacggggaagccggcgtccgaggcggtgcggtgcccgttggcaatctcgccagggtcagcacaagtcatgactggtggcagaagaacaaggtcagggggagcgagggccttcaaagatcagcctgggcaacacagagagaccccatctctacaaaaaattgaaaaattagccaggagtggtggcgcactcctgtggttccagctactcaggagttggaggcgggatgatcgctcgaacccagcaggtcgaggctgcagtgaatggtgaccacgctactgcactccagcctgggtgacagagtgagacccagtctaaaaaaaataaaagaaaatctcccagaagcttagggctgggagaggcctgagcctcaggctgtttcctctgaacacctctgcacacacacgcacttcccaccaattcctcagaaggaagagagcatgaattggaaaaacttaaaatgcagtgcatctattttcaggccagaatgacaggcttaatttttttcaaaattcaacgtatgttatatttcaggcttcgtttagtaaacagtttgcttggggaaaccccaagcccctatcctggggtgaaattcaaaatatttaaccaccataccagagcatactagccaaatcccagcagggtgagcccaacatggcttgtagtctgtggaacagcagctgccctctttagagggggcccagctctcctgtccccagtattctcattatgcccagcccagttcactcacatacactccctgccttcaggcgtttgagtttacaaccctgttgtgaaggaatcataatcatagccatttcttgtatataagcctgagctacgtaccctgctaaatgttttacaaacaaatataattctttgtgtgtgtgcttgttttttttttttttttttttttttttttttttttttttgagatgggagtctcgctctgtcgcccaggctggagtgcagtggcgcatctcggctcactgcaacctctgccttctggactcaagagattctcctgcctcagcctcccgagtagctgcgattacaggcattcgctaccatgcccagctaatttttgtatttttagtatagacagggtttcgccatgttggccaggctggtctcgaactcctgacctcaggtgatccacccacctcagcctccaccagtgctgggattacaggtgtgagccaccacggctggccccaaatataattctttgttttggagacgagaacttgctctgtcactcaagctggaatgcagtggtgagatcacggctcactgcagcctcaaactcctgggcttaagcaattctcgcaccacagccttctgagtagctgggactacaggcatataccaccatgcctggctatattttttattatttgtagagacagggtctcactatgttgcccaggctgttctcaatctcctgggctcaagtgatcctcccaccttggccttccaaagcactgcaatttcagatgtgagccaccacacctggcacaaacataatatttaatcctgattatcctgagaggccaatgtcactgtcatctcccttggagcccagggctcagggcggtcaaaggacttggcccatggtcattcagccagggagtggcagagccggaatctgcccagggtcacagccatggagcactggacagggactcagatatgtgggtcctggcacaccttcaggctcaatctgctgccttgggcaggttccctcctgagcccgaggcagcggggccagccgaactctcagccccatccaggcctgatatcctgtgaatccttccaggggcgggaagctttgtccagcccaaatctggctacctgaagcttctccccttggtcccaccattgcttccagatgccacatggaactacagccccatgtccttggggctggcttcctaaaatttggagaaagtaaccagctgccattcctttctgctcttcaattttctttttctttctttctttctttcttttttttttttttgagatggagtatcactcccgtggcgcaggatggaatgcaatggcacaatctcagcttactgcaacctccacctcccaggttcaagcgattctccttcctcagcctcctgagtatctgggattacaggcgtatgccaccatgcccagatagttttttatttttagtagagacggggtttcaccatgttggccaggctggtctcgaactccagacctcaggtgatccaccgcacctggccctttctgctcttctaaaagatacacactcccagctcctttaaatgtcacctcctctgtgaaatctcctgccccagccctgagaaaattagcccactgctctccccacagcacttcgccacgcccagggcagcatgcgccctgtgaactttccatctgctcttcacaacctcagtcctacttcgccgatggggaaaccaagcctcagaaatgctaagtgcctcgcccaaagtcacccagtgatcaccaccctgcgtatccctcccagactgcgagctccataagagtatggaggggcttgaacccccttcgcctaaccccaacccagcacggggcttcaatgatggcattcaaataaaccaagtgctctgacaagccttggtcctagcaaagtggctccctacaatttcaactgataggactgcgggattggggcggggcgtaggacaggaaggtggagccaagtgtggacccggggagcccagtgggaacctggtcggagcccttttaggggccaaactcagatgccgcagaggaggggtcaggaggggacggggcggggccgtgagacgaggaaacagggaccgagcccaggtcggtgcaagaaagagggatgcagcccggagaagatgagagggagacccagaggggacagtttcggggaaccgggcggaggagtgagaactaaagggcatgggggcaggccttgaagaagatccaggaaggaccccgagcgaagggatggaacccagaaagcacgggggtcgggacaggacaggccgacgacggggcccacagggaaggggcggggccgaggggacgcgggcggggccggctcactcttttggcaggcgggcggcgcggcgctccaagacaggtcccactggcaagtgagaatgtcggagcctagcagctcgtagccaggctcgcactggtaggtgagcaccgtgccccggatcaggtccccgtgggatgccgttctccagccccactccggaggtggcagctcggggcacgtgtcgttcctcgggacctctgcaggggagggaaggcgagtttggaggctgcgttttaactgcgggctcccttccagcctcggaggctttgctctgtgccccctcccgggatctgtctctctctctctctcttagagacagggtttcctgtcgcccaggctggagtacagtggtacaagcatagctcactgcagcctcaacctcctggcttcaaacgatcctcccgcctcggcctcccaaggccccgggataacaggcgtgagccaccacgaccggccacctcccgggatctctggcctgcccgacccctgcccatcccgggactctatccctcagtacctttgaagtgcaatacgaagccctggcccaggcctggatttgggggcccgggcggtgcctgaaactgcagtgtgaggtcgggcccagaggagagaaggcggcggcgcggctgaggtccccgcagctgggccaagactcgggcgctgggaccgtccccgtcgaacagcgtcagcatgtccccttcccgcacattcaatctgcagggggtgagaccaggcaatggggcggggctgcgactggcccctcccatccagctctgccccatcctcaactctgctcattggtagcccctcctactctccagccccgcccatattctcctatcccaggtctggcgccgcctccgttttgaccaaccatggtttctcctatgctagtgcctcagggttcccctattctatggctcctcccatgtcctactacccaatccctaagcttgcacattactaactccgcccactgtccactccctcctccatcaccatgagatccacagcctagcccaactccagctctggccaatcacagaccaaattcgctaacgccctacacaactctaggccccgcctgagtacctgctttgaagccacgcccacttcagcttctgtgccatctcatgacactctcataccaattcagctcactggattctccccagacctccccaacttgctggtgttaacgcaacagtttgggtctgtgtccgtggaaatagctccaggggaagcctcagaaacctccaaagagtgagaggcaccaggccagagccccttgttcacagtggcccctaaggaaggctgcattgccctatttatttgtccgaggttgcctggctaatatgtgatttgagcccagctctctcacgtctatcctgtacccttagtgcaccagcctatccaccgaattctggatagatacgcaagagccagacaggctcagaatgcaggctactgcattggcataccacactttgctgagcctacacccgtcgcaccctctgcaggacccaaacatacatctcaacttggagcaagatgcgcttctcttcctggacgtgcacgccccacacgcagtcttggcccgggctatagctctggggccagtcgggagagaggaccacgccagctggttccgacagctcccctccacacatggctagggaaaaaggggtgtcaggttcaggacccaggtgggcatgctgtcttcatttctccacagtcctcaccactcgtgatgcgtgcaccacatcacctcgcttgtttcctattacctatgatccacctgtttcttttattcttttattttatttatttatttatttttaaattttttttgagacggagtctctctgtcgcccaggctggagtgcagtggtgcgatcttggttcactgcaagctctgcctccctggttcacgccattctcctgcctcagcctcccgagtagctgggactacaggcgccgccaccacaccctatttttttttcttttttctttttttttttttttgtatttttagtagagacggggttttacggtgttagccagaatggtctcgatctcctgacctcgtgatctgcccgccttggcctcccaaagtgctgggattacaggcgtgagccaccaggtccagcccctatttttatttttttagacagagtctcactctgtcgcccaggctggagtgcagtggcgcaatcccggctcactgcaatctccacctcgcagactcaagcgattctcgtgcctcagcctcccaagtagctgggattacaggcacgcactaccatgcccggctaatttttgtatttttagtagagacggggtttcactctattgaccaggctggtctccaactcctgacctcaggtgatccgcctgcctgagcctcccagagtgttgggattacaggcgtgagacactgctcccggctttatccacctgtttcttttttctttctttctttcttttttgagacggagtttcacacttcttgcccaggctggagtgcagtgctgcgatctcggctcaccgcaacctccgcctcccgggttcaagcgattctcctgcctcagcctcctgagtagctgggattacaggcatgcatcaccatgcccagctaattttgtattttaagtagagacagggtttctccatgttgatcaggctggtctcgaactcccgacctcaggtgatccgcccgcctcagcctcccatagtgctggtattacaggcgtgagccaccgtgcccagccatgatctacctgtttcttgccgcatctaggtcctgttgtgttcaatatccagtcctgctcttaacaaaccctgcccactctccagcctgcccaatctgtgacttaacccaacagcagttctcgctcttgaagacatttgggtttgtgacccctgcattcagtaacaagcccagcagttattcagctaagaaaacagcctctgaagggacagggatttacccaaggcttgggtggatgaagtctggatgtgcagccttcctttctgaacggccttgctgggatccccagttcagggggcaacgtggactgaaggacatgcctgcgacaaggaaggctcacctttgcaggccggctctgtgtcgttccagtggggttctgtgggatccacacattcgatggcattggggggcccagggggctccagggcatatcctgggaggcacgagaaggttgccagtgcccctgggcgatactcagggtccgtggtagtgacatttccatgtgccaggaagggggcgaagcagcgatcctcctcaaaggctgggaaggagtcagtcataacaattaagcattaggacaggcctcaagggatcttaaattggggatgtgggctgaattggggtgttctttggccactcactgggcttttttttttttttaaacagtcttgtgctgtcgcccaggctggagtgcagtggtacaaccttggctcactgcagcctctgacttccaggttcaagcaattctcatgcctcagcctcccaggtagctgggattgcaggcgtgcaccaccatgcccagctattttttttttttttgagatggaatttcacacttgttgcccaggctggagtgcaatggcacaatcttggctcaccgcaacctccgcctcctgggttcaagcgattctcctgcctcctgagtagctgggattataggcatgtgctactacgcctggctaattttttgtatttttagtagagacggggtttctccaggttgatcaggctggtctcaaactcccgacctcaggtgatctgcctgcctcggcctcccaaagtgctgggattacaggcatgagccaccgtgcctggccaatttttgtattcttagtagagacaggggtttcaccatgtcggctaggctggtcttgaactcctggcctcgagtgatctgcctgcctcagcctcccaaaatgctgggattacagacatgagtcactgcgcccagcctgggtttttttttaatttttttagagacagggtctcactctgttgcccaggctggagtgcagtggtgtgatcacagctcattgcagcctagatcttctaggctcaagtgatcctcccacctcagcctctctggtagctgggactacaagcatgcacaccccacccagcagctcattttctgattttttttttttttctgtagagatggagtttcaccatgttacttaggctggtctcgaactcctgacctcaggtgatccgctggcctcggcctcccaaagtgctgggattacaggtatgagccattgccctggcgttggtgggtttttaaaaactgaatgccactgggtttagcattcactctccagactgtcaaaaaaagttctaacactcctcattcacatatttatattgcctccctggcctctggagggaagccactgagctagccaaatcccagccaccattctacagagcggaggtccatagaccaaaaagccacttgctcaaggtcacacaaaagacaatggcaaaagcaggtctcaaacccagatggtttgattcccagccacagatacttggctctggaaacagcagagatagcgggtaaggggaggggtgccttcagagaactggctggtgtaggtgtattgtctcctcagaaataacagttggattctgatcatccatgctgttgctgaaacccaaaatttcagctaatgcaaaaactactcagtttttacttcaagtcagcaaaagtgaacatttgtagagcatttgagtttctgcccacctgatcggatcttagctgcaaaactccctgtaagttaagatttaggtgcctatgataccaatgaggaattcttttttttttttttttttttttttgggatggagtttcgctcttgttgcccaggctggagtgcaatggtgtgatctcggctcactgcaacctctgcctcccaggttcaagtgattctcctgcctcagcctcccgagtagctgggattacaggcacccacaaccacccccggctaatttttgtatttttttagtagagatggggttttaccatgttggccaggctggtctcgaacacctgacctcaggtgatccacccgcctcagcctcccaaagtgctgggattataggcgtgagccaccatacccggccttttttttttttttttgagatttttaattttattttaatattttatttttttattttttgagactgagtctcgctctgtcgcccaggctggagtgcagtggcatgatctcacttcactgcaaactcggcttcccaggttcaagccattctcatgtctcagcctcctgagtagctgggattacaggcacgtactaccacacctggctaatttctgtgtttttagtagaaatggggctttgccatgttgcctaggctggtttcaaactcctgggctcaagtgatccacctgcctcagcctcccaaaatgcggagattacaggcatgagccactgtgcccgggttattttatttatttttaaaaatgaggccagatgcagtggctcacacctgtaatccccccactttgggaggctgaggcaggtgaatcacctgaggtcaggagtttgagaccagcctgaccaccatggtgaaactccgtctctactaaaaacacaaaaattagctgggcgtggtggtacatgcctgtaatcccagctactcagaaggctgaggcaggagaaccacttgaacccggaaggcggaggttgcagtgagccgagattgcgccattgcactccagcctgggtgacaagagcgaaactccatctcaaaaaaaaaaaaaaaaggaaaaaaatgagacagggccttgctctgtcacctaggctggagcgtgcaatggtgggatcacaactcacagcagccttgacctcctgagctcaagcgatcctcctgcctcagcctcccaagcagctgggaccacaagtgtgcaccaccacacctggctaattttttgttttgttttgttttgtagagacaaaggtcttgctatgttgcccaggctggtctccaactcccaggctcaagtgatcctcccatcttaacctcccaaagtgctgggattacaggcgttagccattgtgcctggccacagtgaagaatcttaaactcatagaatagcagtggcctacaactctggagtcaggactcacaacttgctattttcggtaaaagatctgtgctgtttgcactttaacactcccagaatctatcccgcaattcatttttgcagatccactgttctatttcactgttacttaacctgcaaggtatcatgtccaaatcctacccatccatcacagccgagtgccaattccatttctcccatgattcatatcaaacactagaccctcctatctctaagcatttcatctttttggtctctctcttgctactgtttatacaactcctctgtttcagccacaatgaaattctgtttcccagacataccaggcatttccctacttgctgtttctcaaagttcctctctttccttttcttttcttttcttctttttttttgacagggtcttgctctgttgcccaggctggagcacagtggtgcaatcatagctcactgcaacctctggggttcaagtggggttcaagtgatcctcccacctcaaccttccatgtagctgggactagaggtgtgtgccaccacacctggataattattacttttttttaatttgtagacacaggatctcactatgttgctcagactggttctcaaactcctggcctcaaacaatcatcccaccttggcctcccaaagtactgggattagagacacgagtcaccacaactggcctcaatcttcctcttttaaaatatcctctgttggctgggcagggtggctcacgcctgtaatcctagcactttgagaggccgaggtgggaggatcacttcagctcagtagttggagaccagcctgggcaacatagtgagatgctgtctctacaaaaaatgtaaaaattacccaggcatggtgccgaacgcttgtggtcccagctactagggaggctgaggcaggaggatcacttgagcccaggaggttgaggttgcagtgaaccatgatcgggccaccgcactacggcctgggcgacaaagcaagacctatttcaataataataataataataataaaataccctctatcctttaaggccaaggtgaaatgcctcttcctccatgatcacttccttgtttctaccccttcacattcattcctcttcttctggtaacggcatcccaattttaattttgggacgcaggccttccccactcccagtccactaggttaagttggagcccaccagggaaggccacgtgaggcagattagccaatcccaatactcccttctcctagctcagtgattggctcaggctaaggccaaccaggatcttagtcaggtcaatgaacgcctctcctggcatttttgctgagctctcaggaaatatatgagtgttctctctgatgaggttactcggttggtggtatgggctggaggaggtggcttacacctgtaatcctggcactttgggagtcccacatgggcgaatcacttgagcccaggagttcaagaccagcctgggcaacatggtgaaaccccgtctctactaaaaacccaaaaattagctgggcgtggtgatgcatgcctgtaatcccagctactcgggaggctaaggaatgagaatcgcttgaacctggaggaggggggctgcagtgagctgagatcgcgccactgcactccagcctgggcgacagagaggaactctgtctcaaaataaataaataaataaaaataaataaaaactaaaaactgtcaggcgcagtggctcacgcctgtaatcccaacactttgggaggcggaggcgggcagatcacctgagttcgggagttccagaccagcctgaccaacgtggagaaaccccatttttactaaaaatacaaaattagctgggcatggtggcgcatgcctgtaatcccagctactcgggaggctgaggcaggaaaatcgcttgaacccgggaggcagaggttgcggtgagccgagatcatgacattgcaccccagcctgggcaacaagagcaaaactccgtctcaaaataaataaaggccgggcgcggtggctcactcctgtaatcccagcactttgggcggccgaggcaggcggatcacaaggtcaggagatcgagtccatcttggctaacacggtgaaaccccgtctctactaaaaatacaaaaaaattagtcgggcgcggtggcgggtgcctgtagccccagctactcgggaggctgaggcaggagaatggcgtgaacccggaaggcggagcttgcagtgagccaagatggcgccactgcattccagcctgggtgacagagcgagactcgtctcaaaaaataaataaataaataaataaaataaaaattaagttggtggtatgtaagtcggcagctatgtccatcacacagggaaagtgcctaaggatgaagccagcacagaggaaagaaccgagatactgagataactggtctctgggctatgtacctggatccagacattcatgaagcttaaacagagaaggctgcctgggggaaggagaaggggtccctagaagagatccttgcagttttggggcagggaagcgagtcacgtttcaaggaacccagcacggagatgaacaggcatagagtttgtgcttccgactatgcttggtgtcaggaagaggggaaggtgtggcggttggggtcctgtgggggagtgggtcacttaccttcaaatcgaaggcttaacagcaggggattggcaggtgtctctgacagcagctccacgtagagggactgggcgtcactgatgagaccccgctcggggacatcgtccatgtccgaatcatagatcacgggggatagggggctgccccctgagcgcaccatcagcctgggatggacagaaacgtgaccaggagctcaatctccctcacaagctgcctcaccccttgcctgctttcctaacttatttttatagctgttatcatcacacataactatatgccacgcactcttctaagcccttacacattctatctcatttaattttcacaagaactcttgagtcagacactattattatcctttattttatagatgaggatattagggcatagaaagatcaagtaacctgtccaaggtcacagagcaagtagtggcagggctgagataccaagttgctaggtaaaggatgataatgatgatgaagatagcagatgcttgaccaggcatggtggctcagctcacacctgtcatcccagcactttgggaagccaagacgggtggatcacctgaagtcaaggagttcaagaccaggctggccaacatggtaaaaccccatgtttactaaaaatacaaaaattagccaggcatggtggtgcatgcctataatcccagctactcaggaggctgaggcaggagaattgcttgcatctgggaggtggaggttgcagtgagctgaatccgtgccactgcactccagcctgggtgacagagcgaaagtctgtctccaaaaataaataaatagataaataaggccaggtgcagtggttcatgcctgtaatcctagcactttgggaggctgaggtgggtggatcacgaggtcaggagatcgagaccatcctggctaacacggtgaaaccccaactctactaaaaaaaaaagtacaaaaaattagccggacgtggtggcacacgcttgtagtcccagctactcgggaggctaaggcaggagaatagcttgagcctgggagacagaggttgtagtgagccgagatcgcaccactgcactccagcctgggcgacagggtgagactccatcttaaaaaaaaaaaaaaaagaggatagcagacacttttatagtgcttattgtcccaggtgccattctaaggactttatataatttcagcacttatcctcacagaaacctgaagagggaagtattgttatctccattctacagatgaggaaactgaggcacaaagaagttaagtgatttgtctaaggtttcacagctacacttcctaagaaagtcttaggactggctgggtgtggtggctcacgcctataattccagcactttgggaggccaaggtgggcagatcacctgaggttgggagtttgagaccagcctgaccaacatggagaaactccatctctactaaaaatgcaaaattagctgggcatggtggtgcatgcctgtaatcccaactaatcaggaggctgaggcaggagaatcacttgaacccgggaggcagaggttgcggtaagccaagactgcggcactgcactccagcctgggcaacaagagtgaaactctgtctcaaaaaaagaaaaaaaaaaaaaaaaaggcttaggactaagctgtgatgcatatctcaaccaggatccaccccagctgtgtccaagtccccacttagcctccctacttccctgaggtggggacttctttttttttttttgagacggagtctcattctgtctcccaggatggagtgcagtggtgcgatcttggctcactgcaagctctgcctcccgggttcacgccattctcctgcctcagcctcccgagtagctgggactacaggtgcccaccaccatgcccggctaattttttttttttttttttgtatttttagtagagatggggtttcaccgtgttagccaggatggactcgatctcctgaccttgtgatccgcctgcttcggcctcccaaagtactgggattacaggcatgagccaccatgcccggccaaggtggggacttctgacccaagacccagacccttaccggtcattgtcctcatccagcgagaccctttcaaagtgcaggtgcagccggcgcccctcagctgcttcaatgacccaacggcaggtgaggttgggccctacggctcccccaggctctggggacacgatgcggcccagggtggcattgtggatggtgccaccacaggatgctgtgggcagaggaggggtacgttaaggccagcctgaggtgaactgtccttctcctcggggcctcggcccgttttcagaactgttgcattcacacatttggctgggacccggcccagggctggcctctgtcccatggagtcactccagaggatgggaccttctccaggcatgagccaggaaagaaaccagccccggtacgggagaaccccaggattgacacctcctaggatggagacaccactaaaatgaagactctccaactgcggatactctaggatggggagttacaaggatccctaaaattcaaagcctcagctgggaaatcttcaggacaggactttcagagtgaagacaccacgggatgggaatcccagtaagaggctctctaggatagaagccctctggacatgaaccctaaaaatggcttcctctaggatgaggacgctaccccagaagggacctccagaatggtgactcccaaaataaaatctccagtgggacaccccgagatggagaccacccaaggatggagaaaccccaaggagagagaccctccgcacaaagagctctggctgcagaccccaggatggggactcctcagggtaaacaccccttcagaatgggttttccccaaaggtggacacctggacacccccgagataggaccctcccaatggggttcccagaacagatgccccacccactgtggcaggagactcacccatgcagctgggggtttcaccgttccaggatggccgggtgccattgaggcagatgagggtctcctctccctgcagctggtagcccgaatcacagtgaaaggtggcagtgcccccagggtgcaggtccgtcacactcacgtccccatgggccggccggggagggaagccacagctcaggaggtaggctgcaccagacagacagcgggtagcagggctcactttcccatgccaccctctcatactgatcccccagcacttcccccctctcctttcaggccaaccttccaggggcacacactggctccatactggcgtacataccgagaaataagagctcctcacacaggcaccttgcctcgcgaacaggaaactccaacaccccttatctcccccactcattgtaattcaccctcgttggcccccattttatagatgaggtatctgaggttcaaacaagttattctggaccccgctactcatttgttgtgtgacttcaggcaaatcaatgaactactctgaacttcatccagctgtaataacagtatttgcagagcttgttcagctcccaaagtgagtccacacagagattttgaggtcagcagacaaagattatgtgacctggctaggcatgctggctcacgcctgtaatcccagcacttttggaggccgaggcaggtggatcacgaagtcaggagttcgagaccagcctggccaacatggtaaaaccccgtctctaaaaaatacgaaaattagccaggcgtggtggtgggtgcctgtaatcccagctacttggtaggctgaggcaggagaatcacttgaacccaggaggcagaggttgcagtgagccgagatcgtcccattgcactccagcctgggcgacaagagcaaaactctgtctcaaaaaaaaaaagattatgtgacctgttttgcaggtgtgaacactgaggctccaagttattaaatgtctcttttgatttttcttccctccacacacacagcctttcttccaccaaggtgccctgtggtataccctcagctcctcagcttccatccagaagaaccacttgaaacttctttttttttttttttttttttttttttttttgagatagggtctcactgtgttgcccaggctggagtgcagtggtgtgatcatagctcactggaaccttgaactcctggcctcaagcaatcctcctgacccagcctcccaagtagctgggactacaggtttgtgccaccatgccccgctaatttttaaattttttgtagagatgacatctcagtatgttgcccaggctggtcttgaactcctggcctcaagcaaacatgaaacttgttgaggaaatttgactattttgtctttttgtttttgtttttgtttttgaggagaagtctcactctgttgcccaggctggagtgcattggcgcaatctcggctcactgcaacctccgtctcccgggttcaagcggttctcctgcctcagcctcccaagtagctgggattacaggtgtgtgcgaccatgcctagctaatttttgtatttttagtagagatgggattttaccatgttggccagggtggtctcgaactcctgatctcttcagacctcctgacttcactttcactgggggattcatttacaggccactgagtattaagatctttaaagacaaaatagtctttaaaggcacagtggctcacgcctgtaatcctggcactttgggaggctgaggcgggcggatcacctgaggtcaggaaaaagacccaggccttgtcctcaggagtccattgtctactgagatgaacataagaacaaccttctagaacaaagtggtttcaataaatggtagctttgggaatggctgcccatgcccaacagaatcaagtctgaatgctttagtttgacattcaagccccttccatagttaaatgcagcccagcacattccaggttcagggttgatctcccaagaccgatatagcctacacaacacagttttgtgactccttaattttccacctccatattttcgcttgtgctctccccctactttctcatcttttaagagatcagactggggggcttatgtaccacctcttccaggaagccttcctgactctacatctctccaacagttacttgttctcttacctgtacacagtcctgcatgcatgattttgtcatcacattaaccattgtctttttttttttttttttttttttttgagagggtctcactctgtcacccagtctggagtgcagtggcttgatctcagctcattgcaacttttacctcccgggttcaagtaattctcctccctcagcctcccaagtagctgggattataggcgtgtgccacgactcctggctaattttggtatttttattattatttattttattattattattttttgagacggagtattgctctgtcacccaggctggagtgcagtgacacgatcttggctcactgcaacctccgtctcccaggttcaagcaattctccggcctcagcctcctgagtagctgggattacaggcatgtgccaccatgcccagctaatttctgtatttttagtagagacggtgtttcaccatgttggtcaggctggtctcgaactcctgacctcgtgatctgcccgcctcggcctcccaaagtgctgtgattacaggcgtgaaccactgtgctggtattttcagtacagacagtgtttcactatgttggccaggctggtcttgaactcctgacctcaggtgatccacctaccttggcctcccaaagtgctgggattacaggcgtgagccaccatacctggcctaaccactgtctacactggcccaagccttatttattttgtgtcctaaaaggctagtctatgaggtcaggagttccagaccagcctggccaatatggtgaaaccctgtctctaataaaaatacaaaaaattagctgggcatggtggcacacgcctataatcccagctactcaggaggctgagacaggagaatcgcttgaaccaagggggcggaggttgcagggagctgagattgtgccattgcactccagcctgggcagcagagtgagactccgtctcaaaaaaaaaaaagggctagcctggctgatcaatgggtgcagccaagaggcagcatggatcggtgcaaagaccactggatttgtcatcaggcagacctgagttccagttctagctccagaacttactaactacatgcctttgagcaggtgacttcatctctaggggcctctcacctattaacggcaataataattcctatcagggaagattggcctgaaaattaaataaaagaaacacgcaaagcacctggcacatagaagctgctgagaaaacgttaatcacccacccctcagcctcaattaatgaatgactgggagccagggactcggggatctgttgtctggctgcaataaacgtgcagatggttgagcaatctacataacctttgagtcttttccttcctttgagagatagaactgacaatggccactctcagggtttctgtgagaagcaaatgaaactaaggttggtgaaagggctttgtaatgggaaagtttgctgaacttggggtgaggggtgaaggagactttggcttttcagagaaactaatgaggccactctggaccagaggccccagctagtgcaggttgggaagggctgaaacagggccttggtcccaaaggtacccagtgcagctgcgaagcagggaagactgagcaatgaaggccaatttgtgcaatagtcctgcttccccaaatgttccacttagcctaaggagtcctattttcagtgccctggggaagtggctgcttaaaggagccagtggggagccatatcttcagatttcacaatatctgaaatccagcacttggcccaggccctccaggaatgctcttgctccccaataaccaggtccctactgccaaatacacgtcccccagcttgctggcccccgatgaataggcacctttgctatgcacacatgagcccctaaggcaggtcctgagcagaggcctcaaaagaggctggagaggacatgagaataggattcagggtgtaccctgcatgaggcacacaaggcatctgcggtcagcagagctttcaaggagggcagagtgcgtgacaccagccaaggccatgcggtgatgtgaagggggcattggcccgacacacagttctctctgtctccatgaagcataggaagacagtggggtctggaacagggcactggctgggcccctttcctcatgcacacatgtctgctagaacacacccttgtactgtgggaaggttcccgcacacacaggtaagcatggatgtacacacatgtgcaggtcatctgtcataggtcctaacaaatgcagtcgtgcgtgaatacagcccccctttcctgcccccagaagtcagaaggatctttaaattgcaaatctgaggctttcactttcctgcttaaaacatttcaggccaggcaccatggctcacgcctgtaatctcagcactttgggaggtcaaggcaggaggatttcctgaggtcgggagttcgagaccagcctgaccaacatggagaaaccccgtctctactaaaaatacaaagttagccgggagtggtggggcatgcttgtaatcccagctactcaggaggctgaggcaggagaatcgcttgaacccgggaggcagaggctgcggtgagccaagattgcgccattgcattccagcctggccaacaagagcaaaactccatctcaaataaataaataaataaataaataaaattcaaattaggaggcctggcgtggtggctcatgcctgtaatcccagcactttgggaggccaaggcgggtggatcacttgaggtcaggagttcgagaccagcctggccaacatggtgaaaccccatctctactaaaaatacaaaaattagccaggcgtagtggcaggtgcctgtaatcccagatactggggaggctgagacaggagaatcatctgaagctaggaggcagaggttgcagtgagctgaggtcatcaccactgcactccagcctgggcaacaaagtgagactctgtctcaaaaaaaaaaaaaaaaaaattcaaatatctgcctgtcacacctgcaggttgaagtagtctggactgcttactgaagcagataaggctctttatggtctgaatctgacctgcctcccagcctggtctctggcccatttccccttcacccgcttctgtgctttgaaagtaatagcagtgactgacagttttgagctctcactgtgtaccacacgctgtttgtgtttttgtttgtttgtttttgagacagagtttcacttttgtcacctagcctggagtacaatggcgcaatctcagctcaatgcaacctccgcctcctgggttcaaacaattctcttgcctcagcctcccaagtaactgggattacaggtgcttgccaccatgcctggctaatttttgtaattttagtagagatggggtttcaccatgttggccaggcaggtcttgaactcctgacctcaggtgatccaccagccttggcctcccaaagtgctgagattataggcgtgagccaccacgccaggccacacactgttttaaacacttgacatgtattaattcatttgatcttccccataatactaagtattgtgatccctatttttcagatgagatcatgaggcacagaaaagttaagtaacttgtcccaggtcacacagctaggacaattctatcttccatgctgaattccttcacctcatctgggggtcatgtcttctctctctgggtcttggagtgtgctttttcatccacttagccatctgcctccctccttctctccctccctcccaccctttccctggcgaatttatccttcaggtctcagcttagtcatcatctcctccaagaagatgtccccatattccttgggagaaatttaggtcccttggctatgtgctgcccccgctggtgtttctgccatcatattccttatctccttgaattataaccatcctgattactcatctgtcttcctacctagattctgagctcgttgaagccagatttacacctggtttgttcattcctccttcaaggctaacacagggcctggtatgaagcaagcacttgataaacatttgttggattcaatggatgaattgtccctcggatgtgtgcacagatctgtgagtgtgtgagataagtatgcatgggtctcctctgagggccctgccccccagggtcgcagtcaggaggaaaagcccccttcggcaccctgtgcttcgatggttcttaaagatgtcccctctataggccgggcacagtggctcttgcctgtaatcccagcactttgggaggctgaggcaggtggatcacaaagtcaggagatcgagaccatcctggctaacgcggtgaaatcccatctctactaaaaatacaaaaaattagctgggcatggtggcgggcgtctgtagtcccagctacttgagaggctgaggcaggagaatggcgtgaacctgggaggcagagcttgcagtgagctgagatcacgccactgacctccagtctgggcgacagagcaagactctgtctcaaaaaaaaaaaaaaaaaaaaagatgtccagtgtatgcagtatggcccctgcccttccagcagcaccctcaaactcctcaccctgatagtggatcctgaagccaccgccccttgggacccgtgggctctggaagtgcagaagcagccggttggttgggctccgaaggacttgtccttctccaagcatggatgagttggccaggagtcggggggccaggcctggggatcccccaccagccagcaccaggagctcctcttcctgtgacaggttcagcgtctgcacctagagaagccagacacagacccgccagggcaagtcagccaggtgtttgacttccaaagcccctgtcctgtgcctttgccctgtgtgtagcagcccaaaaggcaccacgctgctgcccaagttgtagaaatctagaagagtttttgaggtcacctgagtcatcagacaggttctttggctcccaggccaaacccgtgcacacccacagcccagaggaaaaggcttggaagctgcacagtcacatgctttggtccagttacctggatctcaatgccgtagccagggtagacatggatgctgtaagtgcagtccaggagccccagggtgcggctgacggggctccccagatctggagactccacatacccttcgccctcggagatgttgttattacacagaactgaggagatacaaatggctgggatggaaggaatgcctgtgcttttgccctcccagccaagcaactctggccttcatctcccttctccttagcacttctcatcatctttttgttttgtttgagacagggtctcgctctgtcacccaggctggagtgcagtggtgcaatcatggctcactgcagtctcaaattcctgggctcaagtgatcctccctcctcagcctcccgagtagctgggcccacaggtgcacatcaccatggtgagacaatttttaaaactttttgtagaaatggggtcttgccacatttcccaggctggactcaaactcctggcctcaagcgatcctcctgccttggcctcccaaatcactgggattacagctgtgcgctgctgtgcccccctcaccatcttttatttttttatttttatttttttaagatggagttttgctcttgttgcctaggctagagtgcaatggctggatctcagctcaccacaacctccacctcccgggttcaagcaattctcctgcctcagccttctgagtagctgggattacaggcatgcgccaccacgcctggctaattttgtatttttagtagagacagggtttctccatgttgctcaggctggtctcgaactcccgacctcaggtgatctgcccgcctggcctcccaaagtgctgggattacaggctagagccaccatgtccatcactatctttaagcaatgctccctctcccacctgagccagaactccctttcccaactgttatatagctgaaacaattggaacactgcctggtacatagtaagggtacagaaatgctacctttgttattattattctcccatctgtacccaggactccttccacagttcccagcagcctctctcccatccatccccagcgtgtacctctccggtcctcccacccccatccccttgctgtcgcctcacctgggctggtcaccgtagtggtaacagttgtcgtggtgatgatggtggtcgtcgtctcctcctctcctccctcaggcccaaggggaggccctggggaggcagggctgggtgggggtggggctgtggttcctgggggcggggtcagcagttctggcgcagtggggcctgcccccctgaccccgttaggggtgacggctgttgtcagaggccctgtccccggctcagtggcccgtggcagggagggcactgcgagagtctggccggccggaggggtggctagcgtggggtcccgatcagatcctgggacagtgcagggaatatcagagcacaggaggagcacatggaggaccttgggtggggagcagggctgagggaagctaggggttcccctgccataccacaaaagcctcccgcacaaggtacagcaccccccacctttcccttccccaccccagcccctacctcctcccaaggcttccacagcctgagtcccccctctttctcttctggtcccttctctccacccagccccttccaccctgatactcctctccctgagcctctctctctgcctcctcactcagatcacgttctctctctggttatctcctctctcctctgtctcattctctctcgaactctttatttccccatttccctgtttagtattctgattgcactctgatttcatgattcgagatccactagtttttgtgtttcattctctctgtctctgtcttccaccatttctctgagtctggttctctgaatttccatctctgtttctatgtgtctgtttttctgtctgactgtcacctaatcattctgtctctgtctctctggttctgtctgtgcccaggtttgactttctctgacagtctcgttctgtgttccctgaatctcacaggaatgcaggctctttcctctgcagtctctctctgcctgctcttctctagcctggctccccatctccctgagcccatatccctccctctgcctctaggccactcctgccactctgggggcctcacctggcaggtagcccatctctgggcccctcctcagcagggccccatgaagcagttcagccagggcctcagaggccaccgtgggggtctcacttccaggctctggcaatatctcctcctccttcaggggcagacctaggaggtgaagttgtgtgagcttctccacttccccacaccccttccttctccagagagatattttctagaactcttcctccctcctccatcagctgggcctgcaggggctcagatggtcccaggctcgactgagggccaagatcggaggaggggctcccagctgccctcatactcccactcccacacctcttctctcccctcccctctcccttctccctgggctgtgtgggccttcattgaacaccttagctcttatggaccctggacagcgccagcaaggcagaggggtcgccggtgctgccttccctttcacctcagtggtgatctccccccaaccctggggctctgcagaggatctggccgcacctcccagcccttgcttccgcagtgcctggctttctctctgggtttctgtctctgcagtgtggctgtcttttctctctctctctctctctctctcccccccaccctctctctctctggtcctctgcagtctctgcctccttccctggagtctggctgggggtcagagtgggggactgaaaatctggtctttgagccctgcctctgctcatctgtctttgtccattcatccaagaacagttgtgtgtacagcgcctggcatctctctcagcacctccatctcccacccaggtccctccatgcttctgccgcctccgcagacatccccccaactttcccagccctccttcttggatctagcccctgagacactgctaaaagcttctctcattcatttctctgccttctcaatattgagggttaaggggcttcgggttcaagcctgaaagctctggcttgccccttccccatcagctgtgcctctcccctcccccatgtgctcggaagacccaggatattaagagaaaggagggtggaggaccccgctggacgccttcctggggcccacccccacagtctcatgtccttaccctggatccagggacagctcagcagaattaggaacagcagctggggaggcggcgggtgctgggccctgggagtccccatggcgactcaccccgatctctctcctctgtgcctctctaagtaatctggctgccacctttcctccgtctccgtttatctttccctttaattgttttttttttttttttttttttcctcgtaggagtcagcaaagaaagacaatttctctgccccttgggatggaggggcagaattgggctaggggtcgcctggagcccacccccctttgctcagtctcctctgtcctcttctcgcggctctgtggtggagggggcgcggctccggctgcagggggtggggccgagagggccgaaggggccgggtggcctgggttaccctcctgctcaggcgcctgggtccactgggctgtctggaccccaagctaggggactggggaggagaaagacagcttctgggggtttagggtggggtcgaggatcgagggggtctccactgggctctagcggggcttgtcggggaggggaaggggtgggttggggaactgggagagccgaagctcgggcactggagctgcgggagggagaagctgagaaaggtatcgagcccacgtcagatcctggggacgggcggagggaggggcctgggatttatttgacggggagggaggaggaggaagtgcagatggaggagggagggatcatacgagccagggccgtaatcctcactcccgcggcccctaggggaggcaaaggaaactctctggtcccagcagtaattagccccctccgcctgccattccagcacatctggaatctgaatctcctcttcccagggtgccgaggggctgcatagcttggttcgcgcctgctaggcccccaattatgccccctgttcacattcagacctcccaaggggcttcccttccccttttacagtagctcgggtggaatgggctctccctcctccaggggaatagagagcttccacgattgtgacaagtctcgtgggtgacgggccggggtttggggaggagagacagacccctcctcttccataaaccctgaccccggccagctaacaggcggcctcggctctgattttccctccggagcgcccttttcagcaccagcggcgcgcggacagctcccctcgccccgccggggcgggcccggcccgacgccgcccgcgattggctgaggccgctttcggtgtttgccaggctcgcgggctcccgggctgcctagggccagcgggagtcacaggccgaccgaccgacggaccagccgcccgacggactggcctcagcatccttgcccgcagtcccgggcgcctgcccagccgtcagtccgcgctcgccccgcccctcaggccccgcccctcaggccccgcccgatacgacccgccccttctttcgcattgcgggacggctggaggctggcaccgtggcccctgcgccccacgtggcgccctttccgggcggggggggtggggaggcacctccagcgacaactctcccccctcccccggcacccggctgatttgctgtgccactgggagggttcgggggtggctgagctgagagggctccgggaaggagtgacgtcagggtgagtgggagcccaggaaggagcgagtaggagagagggagcgagagccaggcaggaccgcagggtcggggctagtgaggagcgagggcaaggagagagcagtgaggccggagagaaagaagctgccgcggaggaagacaggctgcgggttcccgggactgcaggtccaggcagggtaggaaccgctgcccaggggagctaggaggaagcggggagagagagcgagcgaaaagcgggggtggggaggaaagggggagattgaggtgggagagagaagcagagcgagagagaggaggctgctggaaggagaaagaagagggtgaggaggcgacagagggagaggaggaagaagaggtagaaggagagagaaaggggagagaaaggagagaggagggttggaggtgcatgaaggaggggagagggagcttcagcgtggagagaggaccgcggaaggagagagagacagcccagagtggaatgtggaagggaaacagtccagcggggagccagggggcagccatggaagggacaggtggggagctggggggacaggggaactggggtccggaggacgccccaggcctcttggccagggcctccctgatcatgctcccgtggccactacccctggcctcctcggccctcaccttgctcttcggggccctcacttccctgttcctctggtactgctaccgcctgggctcccaagacatgcaggccctaggggctgggagccgagctgggggtgttcgtggtgggcctgtgggatgctcggaggccggcgggccaagcccagggggtcctggggatcccggggaaggacctaggacggaaggcctagtgagccggcggcttcgggcctacgcaaggcgctactcctgggctgggatgggtagagtgaggcgggcagctcagggtggcccaggccctgggagagggccaggggtcctaggtattcagcgcccaggcctgcttttcctaccagacctgccttcagccccctttgtgccgcgggacgcccagcggcacgacgtggagctcctggagagcagcttccctgccattttgcgggacttcggggctgtgagctgggacttctcagggactacccctccgcctcggggctggtccccacctctggcccccgggtgctaccagctcctgctgtaccaagcaggccggtgccaacccagcaactgccgccggtgcccgggggcctatcgggcactgagggggcttcgaagctttatgagtgccaacaccttcggcaatgccggcttttccgttctcctgcctggggcccggctcgagggccgctgtgggcccaccaatgcccgggtcagatgccatctgggtaagtagctgccgcctactgacaacctccttgcctcgatgatttcccccccagacccttctctccgccagagccgtctgctgtctggttctcattgtgcctctcttcttccatggctccctgttgccacccacagcagcatttcctcagcctcggttatctgcacaccaccttcataagctttgccgtggtcattcccatctgtactgcgtttcttcaccttggctctccccccgaccttttgttctacgtatttaaaagaaatatttatagcactatcagtattacttgccctaaatagtactcataaaaagcctggacaacacagtgagaccttgtctctacaaataataaaacaattagccgggcgcggtggcccatgcctatggtcccagctactggagagggtgaggtgggaggttcactggagctcagcagtttgaggctgcagtgagctgagattgtgctactgcactccagcctgggtgacaagaaagtactcataaacacaagctgaaatttaaaaaagaaagctttcaacagtctagaacattctagttaagtgctctagtctctctgatcctgaagcctacacttttttcttttttgaggagtctcgctctgtcgcccaggcgagagtgcagtggcacgatcttggctcactgcaagctccacctcccgggttcataccattctcctgcctcagcctcccgagtatctgggactacaggcacctgccactacacctggctaatttttttttattttgtatttttagtgaagacagggtttcaccatgttagccaggatggtctccatctcctgacctcgtgatcaatccgcctcggcctcccaaagtgctgggattacaggcatgagccaccgtgcctagccctacaccttcttttttaaaagggttggtggggtgtcaaagttacagtagcaccaaactgagattttttctttttcttttttttttttttttgagacagggtctcactctgtcacccaggctggagtgcagtggcacaaacatggctcactacagccttaacctcctgagatcaaaggatcctctcacctcagcctcctgagtagctgggaccacaggtgcccaccaccatgcttggctgattttttaaaaatttacgtaggccaggcgcggtggctcacgcctgtaatcccagcactttgggaggctgaggcaggcggatcacctgaggctgggagttcgagaccagctgaccaacatggagaaatcctgtctctactaaaattacagaaaattagctgggtgtggtgtcgcatgcctgtaatcccagctactcgggaggccgaggcaggagaatcacttgaactcgggaggcggaggttgcagtgagccgagatcacaacattgcactccagcctgggcaacaagagcgaaacttcatctcaaaaacaagaaaaaaaaattgtgtaaagacaggctggacctgaactcctgaactcaagtgatcctcctgccttggcctcccaaagtgctgagattacaggcgtgagccaccgcacctggcactttttgatgtcttaaagactggaagaaaatggaaaaggaaataattttctgttattccatgccatgaccttgttttgcccccaatcatctcctgtgctgccagctggatgtgtcctacacttcagggcacactagcctcaggatcagttcccaatccttcctctcttccctctctctgtgctctaaatcatgaaaaccttctggccaatcctgacagatgccacatgtgctgttcttttcaacctagaatccccttcccccgtaccacctcctgaaaaactcctactcagccttcagtactcaagttttcaagtgccacacttcctctgggttggcttcctgttcccccatcagttgagttggctgctcactttcctcacagcactcagccatgtggtccttgggccaggaacgtctttaatcttatacctctcagtgagacagcgcctatcacacagtaagctcttgagtcaaactgtcgaaagcccaggaggaaaagccatttcctccaggaagccttctcttttctcgaaatgagaggttgctgccaggtgccgtggctcatccctgaaataccagcactttgggaggccaaagcaggaggattgcttgaggccaggagttcaagaccagcactgtctgtataagaataaaataaaataaaataaaataaaataacgggtctggccaggtgcagtggctcacacctgtaatcccagcattttgggaggctgaggtaggcagatcacttgagctcaggggttcgagaccagcctggccaacatggcgaaaccccatctctactaaaaatacaaaaattagccaggcgtggtggcaggcagctgtaatcctagctactcgggaggctgaggcaggagaattgcttgaacctgggaggcggaggttgcagtgagccaagatcatgccactgcactccaacctggcgacagagcaagactacatctcaaaaaaaaaaacaaaacaaaaaattaaccctgcattgtagcacatgcctgtaatcccagcagctactcaggaggctgagacacgagaatcacttgaacctgggaagcagagtgagctgagatcacaccactccactccagcctgggtgagagagtgagactttgtctcaaaaaaaaaaaaaaaaaaaagatgggtcacactacccacagcagcgtttccctaatctcctagcacttccctcctccaggactgtattgtaattatactgtggccactttctggaaagaaaggaggatgaccacaaaacctggcatttaagacacttagagctagttgctaattgactggccaggatgggcccctgggatggaggcaggagtgctggatgcccgcgtctcttcttacaggcctaaagatccctcctggctgtgagctggtggtcggcggtgagccccagtgctgggctgaggggcactgtctactggtggacgactcttttctacacacagtggctcacaatggtaacggggtgcccattctgcaggggggatgagggactcaggagcaaaggagcgttgactagaaggcagcagaatcaggcccaacggacttcctgtcctaccaccaccatcttccagctgcatgaccttgaacaagccgcataacttctccaatgccctaggaccaccaccttcttcatcaagtaactgcaaggattaaatgagataatattacgtacacagaaaagcggttaccagcacaggactctgggttcctgtcctacctcttgcacttgggcaaaggacttaacctccttatgcctctgttgctttgtataaaatagggataattatggtaataccacagtttgttttgatgattaagagttgatacatatcggccgggcatggtggctcacgcctgtaatcccagcactttgggaggctgaggtgggcggatcacctgaggccaggagttcgagaccagcctggccaacatggtgaaaccccgtctctattaaacatacaaagaaattacccaggtgtggtgatgagcacctgaaatcccagctactagggagactgaggcaggagaattgcttgaacctgggaggccaaggttgcagtgagccgaaattgcgccactgcactccagcctggtgacagagcaagactccatctcaggaaaaaaaaaaaaaaaaaaaaaaaagatttgatacatttaaagggttagaacaaggcctgccacttatttactgtttgcttttatggtgtttggtgagtgctctggtgtgcaagtacctaatgtcagtggctctgctgttcctgtcccatgtgccctaggctcccccgaagatgggcctcgagtggtcttcatcgtggacctctggcaccccaacgtggcaggggctgagcgccaggccctcgactttgtcttcgccccagacccttgaaggaaggtgctcccttcacacacccaggctggagagacactgcgctcagggacggcttgatggtagccaggacctcctctctactgcgggggtgggcgggggcggaggatgggaactggctagtgagcactgaaatataaattctgaatcctctcctaactcccgactacttccttcgcagggagaggctggggcagggccttatgtcttctcctagtacaaccaaacaggtacctccttttttttctttcttttttttttttttttgtagagtcagggtcttgctttgttgcccaggctggtcttgaactcctgggctcaagtgatccttctgcctcaacctcctgagtagttgggattacacgtgtgagccaccacgcccggccagatacctcctaacacaggcatctccccgtccctctccccaggagccagcaccagtttctcaacttaactttatttcaataatttaatagaaaattaaaataataaataatatgaaacagactgataacgctgagctgggcaggcccaggccagtctagtacaaagttaaggaggtagggaggatggtggggaggagggggcggactaccctgcaggacgcgggaggctgctcagactgtggtgatgtcaggaagggccgcacactttggcatggacgatgcactaaaaaaagagaaagggaattctaaatccctcttaaccagctggagagggaaggacgcagggccagggtggggacaagtgttggcttcggaaggctctgagtggtggggccggaatgtaccatgttgttagcaatggggttgggatgggtggagaagggccaaagtgagctgtgccatgcaatgaagggacagaggaggacccacgacttggccagcagagccggggcaaaagtctgggaaggggagggaaagagagagggactgggtcccaaggcaagaggaaggcagggggagggtcagaggtcagtccttgaagacaatttgttggccatgaggacgctcgtcgtgggtgatatggcgccggacatggatcctgcggacacggtgctctcggttctcttcatcctccccgcggccagccccaccagctccagctgctccccctgtggcctccaggagggctgggtctgggccccggggagtctcgtagatgaggatgttcagggtctcctcgaagatccgggcctctggaaattccacctgcaaaaggccagccggccccagctccttccttctggtgcagtcacgcagggccatccccctgcctagggcccctgcaccaacacacctcctagccctgcagtcaggtccttgggcctggcctggcctctctgccactcctttactcagcaaagtcatacttcaaggctcagctctgaagtcaggcaggcagaattatttgttttctctccttcatctccttccctgcctagcctcttggtatattttttcatttgacaaatactgagtgagtgcactgcaccaggtattgttctaggcactgcaaaaatagcagtgaacaaaacaagagttctgtcctcaggaggttacattctagtgggaggactcagtcatacacttaagaaaatataaactagcctggcgcagtgactcaggcctgtaatcccagcactttgggaggccaaggtgggaggacagcttgaggccaggagtttgagtctagtctgggcaacatggtgtaaccccatctctaccaaaaatacaaaaaattagctaggtgtggtggcccacacctgtgttcccagctactcgggagactgaggtgggaggatcacctgagcatgggaggtggaggttgcagtgagccaagattgtaccactgcactccaacctgggtgacagtgagaccccatctcaaaataaataaataaataaataaaataaaatataaatgcagtcaaatgatgatgtttaggaaacgatataagctgggtgtggtgtctcctgactgtaatcccagcacattgggaggctaaggcaggaacatcgttagagcccaggagttcaagttcaaagccagcctgggcaatgtagcaagacctcatctattaaaaaaaaaaaaagagagagagagagaaagagatacatcaggaaaagagatacatcaggaaaaggggatgtgatagccagagccaggagtgttacaactttaagaaggactccagggaaggcctcactgagaaggtgatatttgaccaaaggagtgggggaggggacaaggcacacagagcagaaagagcagcctggggagggccagggccagcgtgagagctgtgggtcaggagtgcacccagtgtcttactggaagatcaaaagggaggccaatgcaattgaggcagagatgagagggaatggaaagggatgaagtcgaagaggtgactggggtgttcccttgtgtggccttggaagcatctaacacagctcttagcaaactgtttttttaattttttatttttattttttattttttcctgagacagagtcttgctctgtcacccaggctggagcgcaatggcacaatctcagctcactgcaacctccacttcccaagttcaagcgattttcctgcttcaacctcccggagtagctgggattacaggcatgtgccattatgcccagctaatttttggatttttagtagagacagggtttcaccatgttgtacaggctggtctcgaactcctgacctcgtgatctgcccgcctcagcctcccaaagtgctgggattacaggtgtgagccaccatgcccggccttttttttttttttttaatcgttgtttgtttgtttctaagacaagatctcactctgttgcctaggctggagtgcagtggtgtgatcatgtatccctgcagcctcaacctcccgggctcaagtgatcctcccacctcagcttcctgagtacctgggtgtaccactatgtccagttaatttttttttattttttgtagagatggggtcttgctgtgttgcccaggctggcctcaaactcctggccttaatggtcccctgcctcagcctcctaaagtattgggattacaggtgtgagccatgcactctaattattggtttatcttcctatcttcccaatcagaggatgtttcttggaagctgggtcactgattcattcattcattcattcaataaatgtttcctagcttccactgtgtgaaaagggcccagctaatgggagataggaaagaaaaagacatggccctgccctcaaggaactaacacctcgctgctgatgcaaaccccctcccctccaccacacatgataaaacactgtctttagctatgaagggagtgtgaccaactttggggttgctggattgaaagttcatgagtgaaggtgacccaaagaaagtgatgcttagcttgagtcttaagattaagtacaagttcattaggcagatagaaggaaagaattccaagaggcaacagtgtgtgcagaggtaagaggtaagaaatagcactgagtgcttagagacttgtgatgactgtggtgtacctgaggcatgtggctcatagtaagctcggaagggaccagatgaggaagggcttgtattttgctcagcacttcattccccttgatttccagcccggtacagtacttagcacagagcaggggcttggggaatatcttgatgattgccacattaatgactcaggatctacaaactcagaggatgttctaagagacatctgattctgaggttttaagaatctatttttggcaatgggcctttctgagtttcccttttttttttttttaattagagttagggctcactctgtctcctaggatggagtgcagtggcatgatcatagctccctgctgcctcaaattcctgggctagggcgggcccggtggctcacacctataatccaagcactttgggaggccgaggagggcagatcacttgaggtcaggggttcaataccagcctgaccaacatggcgaagtctctactaaagagacttctctactacatttagtctctactaaaaaatacaaaaattagccgggcatggaggcgggtgcctgtagtgccagctacttgggaggctgaggcaggagaatcacttgaatctgggaggcagaggttaagtgagctgagatcacaccattgcactgcagcttgggcaacagagtgagactctgtctaaaaaaaaaaaaaaaaaaataggctgggggcagtggctcacgcttgtaatcccagcactttgggaggctgaggtgggtggatcacgaggtcaagagattgagaccatcctggccaacatggtgaaaccccgtttctactaaaaatacaaaaattagctgggcatggtggcacgtgcctgtagtcctagctactggggaggctgaggcagaagaatcgcttgaacctgggaggtagaggttgcggtgagcggagattgtgccactgcactacagcctggtgacacaacgagactccatctcaaataataataataataataataaataaataaattactgggctcaagcaatcctcctgccttagcttcctgagtagctgggattacaggtgcatgccatcatgtcaccaagccaccacacctggctaaattttttgacttcttacagagatcaggtcccacgatgttgcccaggctggtctcgaactcctgggctcaagtgatcctcctgccttggcctcccagagtcctggggttacaggcgtaagccactatgcctcaccccttctgagtttctaatggcaactatggaccccctatacagaaaaatgcatacacccccatttcaggagttgcaaacagccttgaaacccatccaacaggcctaggctaagcaccctgctctaacccgtgacccccatttcacagagaaacagagacccacagggatagggtggcttgcccactgttgtgcaccccagaccccaggatctggctcctgcctcctggtggtgggctccttcccctgccaacctgcttttgtccagggtcctggtcctggccacccccagcccccaacataggctctggagcccctctgaccttggtctgcttcttctccgtagcatagacaatggaggtgcagcacacctcggcgattttgcggccctgcccgtagaaagaccagcagcagatctcgtcccccaggacatccttgaggaagagtagccgcccgtggaagcgcagggccagcttgtcgaacagctcgatgttcttaagtaggttgtcatctgaagtgctggggaccaggggaccaggaggcctcagcgcagttggcacccctccctctgtacccccagaagacgggcctggatgcattcccagtcctctgctcctgcccagggctttggtgctcaacagagagcctcctccacccctggggccaggctaaacgggtctcagaagggaagccacatgcgctgagcaaatcccagcacagcacagcacagcagctccagtgagggaccgggagccaggccacctccccgggggtcctggtgtccccattttttaactgggtgacactaggcaagttacttcacctcttggtgtcccgacctcctcatctgtaaaatggagctcacaacagtactgacctcaagggggaggactctgccagttcctagaatgagagcacttgggataggctcgccactatcactttgtcctcacccaaacccatttactgatgactgagctgaagctgagaagcagaaaggacctgcctagagcgtcaggggtaagaggcgaagccgaatctgcgagcaggcacagatgttcttgtaggccccccgtgtggccgtggccctcgccttgggcagaagcagggctgtgctgcatcccagggtcccgcccagtgccccgcaccccggcggtcacctggtgtaggagtacttgttgttactgcggttgtgcaggagcttcaccacgggctggcgggggagagaggatggacgagaggggtgaggctgcagggagaggcccccccagtgagcctccaccctgcagggcttgggggcctcaccttggaggtgctggccaggagctgctgctcctcccggggagatgtcaccatggggatgaggcacagcggggacagcgtctcccttttttgctggggaagaagcggaaggtggttaacagcacaaccaaaggccacgtactcccccacttaaaagccttcaaaagctggttgggaacaactccagactcctcagtggtccgcagggctctgcaggctccaagctccgccagcctctctgccactctccctttgcttgctgggccttggtcccacggacaccttgctgcttcacacatccagcttgtgcctgccccggccactggctgtgcccctgcccgggatgcttctttgctcagctgtcagcgtggcgtgtccgtcatgccattcagatcgcaggtcacacagtgcctcctcagggccagccctccccagcccccctggctaaaacagcctcctctacatcctgccttttgtgttatcagttttctttttctttttttgagacagagtttcgcttgttgcccaggctggagtgcaatggcgccatctcggctcactgcaacctccacctcccgggttaaagcaattctcctgcctcagcctcctgagtagctgggattacaggcatgtgccaccacacccagctaattttgtatttttagtagagacgaggtttctccatgttggtcaggctggtcatgaactcccgaactcaggtgatcagcccgcctcagcctcccaaagtgctgggattacaggcgtgagccactgcaccaggcctatcagttcattttctacacagcagttagtgtctgactttttctaactttttgtatttgtttatgatctgtctcttcccacctaggaataactacctagtatacagctgatgctctgtatttgttgaatgaatgaacatatttgttgagtgaatgaacttcattgggtgggatgacgttggagaaagaaatctgaagcaaacccatgggcttctttctcttctgtcttctagaatcttcatgccaaaatccctctcacttctcccaaccttgaaaactcaatgcgcaattctaatacaaattccagatttgttttttgcagaaactcataagactctctaaaattaacagagaataataaaagtctacaattactgaggccattttttttttttttttttttttgagacagggtcttgctgtcatccaggctgagtgcagtggcatgaccacagcttacagcagccttgacctcctgggctcaagccatcctcccaaacttaggtcagtttttaaaaataagagcaaagaggaaaggccgaccctgccagatattaagataggctgcaaagccacaacagtgagaacggtatcagttcgggcacagaaacaaaaatacctgagaaacacaacagagcgatcagaaacagaccactgtgtatatgagaattggtatttttaaaaagacaccacaaatgtgcgaggggaattacggagtatgaattcgttatctatcactgtgtaacaaactgcccccaatttaggagcttaaattaacaatatttattacttctgtttctgagggtcaggatctcagcagtggctcggctgggtggctccggcacagggtctcttctgaggctgtggccaagatgtcagtggggctgtgggcatcaaaggcatgaccgcccctagaggatgcactctgagaaagcttgttcatgtggctggcaagttcgcactagctgctggcaggaaacaacaaatccctgccatgtagatctctccacagggttgcttgagtatcctcgcagcatggcaactggcttctccagagcaaataattccagagagggcaaggtggaagcctcattgtcttttttatttttgagatggagtctcactgtgtcgcccaggctggagtgcagtggcgtaatatcggctcactgcaacctccgcctcccaggttcaagtgattttcctgcctcaaccacccaagtagctgggattaccgaggtgtgccatcacgcccagctaatttttgtatttttagtagagacagggtttcaccatgttggccaggctggtctcaaactcccgacctcaggtgatccactcgcctcagcctcccaaagtgctgggattacagacgtgagccacagcgccgggcccctccattgtcttttatgacctaggtctgttggtcctatccagtgaggaaggagatgacacacaggaacgagcaccaggggacgagaatcatcaggctgccttggtggctggctccacaggccaccgctggctctcagtgatttcccccctcccacatgccaaatatactcaccaccttccaggatcccccatcatcccattacagcatcagctcaaagtacagaatctcatcatctcagtcaggtccaggtggggatgtggctctagcatgcagttccgtaactatggctccttaagtgcatttcttttttttttttttttttgaaatggagtcttgctctgtctcccaagctgaagtgcagagccaccaccatctcacctcactgaaaactctgcttcccaggttcaagtgattctcttgcctcagcatcccaagtagctgggactacaggcatgcaccaccatcccagctaattttctttagtagagacgggatttcaccatgttggccaggctcgtctttaactcctgacctcaggtgatccacttgccttggcctcccaaagtgttgggattacaggcgtgagccaccgcatccagcccttaagtgcatttcctatctgcagacctgtgagctaaagagacaggtcatctccacactcccagtgtgcagtggtagaggcaggcacaggataaccagtaaggacattcttgctcaaaagcaggggaagccgggcgtggtagcgtgtgcctgtcatcccagctactcaggaggccaaggtgggaggattacttgagcccaggagttcgagaccagcctgggcaacatagcaagactctgtctcaaaaaaaaaaaaaagtggggcaggggacaggaggcacatataagtcatacatataagtcactggtgtgtggaaattctgtaatccagttggagaaatgctaggaactctttgatgcctactcctgttcatgaatgattctccatggctctccctgagtcgtcccacctcttccatgaaagatgtttgcagctccacagtttcatctgcctgcttcctgcctgtaaaagtttgggtgtgcaaagccgtcttgtccttttgcactggctctgtccctttcagtccaagctggcagtgtctctgccaatataattctcttcataacttattgggtatcttgcatgtcttagggttcactacattagaaaaaagccacacctagaaatctctgcaagtggccaggcacagtggctcacgcctgtaatcccagcactttgggaggccgaggtgggtggatcacctgaggtcaggagtttgagactagcctgaccaacatggtgaaaccccatctctactaaaaatacaaaaattagctgggcgtggtggtgggcacctgtaatcgcagctactcaggaggctgagacaggagaatcacttgaacccaggaggaggaggttgcagtgagctatctcaaaaaaaaaaaaaagaaaagaaaaagaaaaaagaaaatctctgcaaggtaagcccttctctactttgggcttgtgctgagacgctgaaagacaacacctttaaccttctcagaagcgtgattattatttcattcgactggaagtcccctctgaggcatcttgttggtatttctgaggtcttaacaaaggactttttcatcacatcctcagcttgacctttagaccacatttccctgtatttaatgccttgtatttaatctttgcacggaagccatttgttaattttaacatcacttgttatctggaaaggctgggaattttcaaacccaacaatttcaggctctttttcatttaagtgttttttttctttaacttactctctcctcttcagttttactataagcagcaagaagccaggtggcaccttcaacattctgtctggaaagctccttagctagaccatccgttccttaggtatatttcctaccctccacactaatgcaggagacagtgttgctaaactttctgccgctacacaaggatctcctttccatcagtttccaatagcattttcctaactgttcttcaagcccttattgcagctgtcttaaaggtcactggactcttattaacagactttctcaccttttttcttttaatttttttagagacaaggtctcactatattgctcaggctggtctcgaactcctgaactcaagtgatcctcccaccttggcctccaaaagttatggtattacaagtgtgaaccactgtgcccagccaatactttttaacactccttaagcttttactaacaatctcctcaaagtccttccagcttcttcccacttctcagttgtaaagttacttctacatttgaggtttctgttatggcagacccccattccagaaaccaaagtctgttctctgttactgggtaacaaattactacaaactcagcagcttaaaacaacagtccaggtgtggaggctcatgcctgtaatctcagcattttgggaggccaaggctggaggactgcttgaggtcaggagttcgagaccagcctggccgacagagcaagactctgtctctatttaaaaataaataaataaaaataaacattatctcacatagtttctgtgggtcaggaatttgggatgggcttagctgggtggccctggcccagaatctgtcatgaagctgcagtctggattttggctagggctgcagtcatcagaaggtttgcctgggcctagaagctctggttctgagacaggtcaccactatggcggggagtctgtgcttgctgtcggcaggggcttcagttcctcaccaagtggacctctgcttagggatgcctgagtgtcctcacatagcattcacatagagtgagtgatctcaaagagaggcagaagctgtaatgtcttttatgacctagcttcaaagtcacatgctgtcatttctgcaatgtcctattggtcatacacaagggtctccttggtgaggatctgaaaaggtctgccctatttggtgtgggaggggactgaacaagagcctggaaaccaggaggcaagaacccctggtggctgtcttgggtgctggctacctctggactgtttaatacctggcactgggaaaactacctcaccctatggaagacaaaaatgagctaaatcccttcacaatcatatttacaaaagtgagttccatttagattaaaatacccatatatgaaaaaaatccatatttaaaactataggtcaggtatagcggatcacacctgtaatcccagcactttgggaggccgaagtgggcagatcgcttgagctcaggagtttgagaccagcttgaccaacatggcaaaaccccctttctacaaaaaatacaaaaattagacgggtgtggtggctcatgcttgtaatcccagcactttgggagaccaaggcgggcggatcacgaggtcaggagttcgagaccagtctggccaacgtcgtgaaaccccatctctgctaaaatacaaaaattagccaggcatggtggtgcacgcctgtaatcccagctactcaggaggttagggcaggagaatcgcttgaacccgggaggcagaggttgcagtgagccgagatcatgccactgcactccagtctgggcaatagagtgagactccatttagaaaaataaaaaataaaaaatcagccaggtgtcatggtgcacgcctgtaatcgcagctactcgggaggctgagacatgaaaattgtttgaacctgggaggtggaggttgcagtgagccgagatgacaccattgaactctaacctgggtgacagatcaagactctgcctcaaaaaataaaaataaaactacaaagctcacaggtaacagaaaatcagaaaaacatttttaaacaagaccataaggatacagcattaggcaaaaaatggtgaggaattggactacatccaaatcaagaatttttcaagttgacaatggaaagcatgactttacaaataatctcatgtaataatgttgaagagaaaagacttataggtattctgtggcacaaatgtaattactggttcaggtaaggattatcaatttgtgtgtcattgataggtaactgccttaatacagtggccaaataccatatgcattattttatagttagcaacaaggaaatgtaacaatgatagagaaatcaaaccaccatcccctagatccaggggccaattatgaacgtcattaatgacgagtcatattaacaatattatgggttgcttgatgtggcccaacgtgaaatacatacataatattacctaaaatgtattctaaacaaaatgtttaatatcagtcattttatttattttattatttattcatttattttgagacagagtcttgctctgttgaccaggctggagtgcagtggtgcaaccttgactcactgcaacctctgcctcccaggttcatataattcttctgcctcagcctcctgagtaactgggactacaggcacccaccaccactcccagctaatttttgtaattttttatttatttatttatttatttttgagatggagtctcgcactgttgcccaggctggagtgcagtggcacgatctcggctcactgcaacctctgcctccccaggttcaagcgattctcctgcctcagcctcctgagtagctgggattacagatgcccaccaccaggcctggctaatttttttgtatttttagtagatacagggtttcaccatgttggccaggctggtcttgaactcctgaccttgtgatccacctgcctcagcctcccaaagtgctgggattacaggcatgagccaccgcacctggcataatttttgtatttttaatagagatggggtttcaccatgctgaccaggctggtctcaaactcctgacctcaagtgatccacctgccttggcctcccaaagtgctgggattataggcgtgagccaccgtgcccacccaatatcagtcatttaaaatctacagtctggtttacaggaaattaaggataaggctgggtaataaaccaaacgataccgggagtaaacaaccaggcaaagttggaaagcgggtcattgtgcaggacaactggcagtctctttaacaagccagcatcgtgaggaaaaagggaccccttggattgtaataaagtaatgcttatggtattatttggcttatgtaataaagtaatgcttatggtattatttggcttatgtaataaagtaatgcttatggtattattatggtaactgtattaaggcagttacctatcaatgataatccttacctgaaccagtaattacattcgtgccatagaatacctataactcttatcatctcttcaacattattacatgaaactatttgtaaagtcatgctttccattgttaacttgcagataaccagatgcaacgtgaagatctagactggaccctggtttgatgaaccagctgtaaaaacacatttctggaacaactggagaaaccggagtatgccctggactggatattaaataaaaatttattgacatgtaaagatggcaattattaacaacaacaaaaaacagattataaaacatttcatacaacacgattgtattttggcaagcaaatacacacacacacacatactctcacacaggaaacgacctggaagaatatttggtgcttttattttttagattatttgtgtttctgaaatttctacaattaataaatactgctttaaaataatcaatggttatttgtaattttaaaaaatcaaggatttccattcaatgctagatgccacaagtgggtgacattctaagaaaaaatattggcgatatctacattgactagaaatttttatctagaacagactttttcaactgaagttcctcatctgaatctcaaaaaccagcaaatatggccaggcacggtggctcacgcctgaatcccagcactttgggaggccaaggcaggtggatcacttgaggtcaggagttcgagaccagcctggccaacatggcgaaactccatctctaccaaaaatatgataaaattagccaggcattgtagtgcacacatgtagtcccagctacccggaaagctgaggcaggagaatcacttgaaccccagagagggaggttgcagtgaggtaagatcgcgccactgcactccaccctgggcgacagagcaagactccacctcaaaaaaagaaaaacaaaaacaaaaacaaaaaaacagcaaataatttgagtgttttctgaactttgctgagaacagtaggtaaatagtcccatgctacaggcttagaggttaatttgttatgtatataatccatgccctagggaatgtataagacatacccatatgcagtagggcttaattatccctaggaactaaactaaaatatgcaaggatctcctgctaagcaacatgaaaaagaaaaaagcagaaaatctggtaaagaacatgaataagcaattcacaggaagggaaacaaaaaaacactagtgagtatatgaaaagatgctgaacctcattagtaatcagaggcatgcaaatgaaaatgagatcacgctacactcattggattggcaaaattagaaagctggatgatgccatgtcttgatgaggacatgcagaaatgtaatctcttatgcactgctcattatgaggataaagtattataaccattcgggagagcaattagatgatatttactaaaacgccgtttgcaggtgtcctgttatccagcaattctactcccagctacaatgacaggagactggcacagaatcagaagggagcatgtaccaggatgctcatggtgacacggtttgtaggggcaggaactggaaggcaatctaggtctccaacctcaggggaatgtatgaacaaaatatggtgaatgaacaccgcagatttctctgcagctgttagaagcaaagaactagatgtacttggagcagcatgaatagatcttgaaaaaaagtgctgaattaaaaaaacacaatgcaacagaaactgattcacagcttcaatgccatttatggacatttaaaatgcacacatatgcagaacaatgctttagcttttcgagcatatgtatcaaaacattaaaattggatgggtgcccctgggaaaaaggaaagtaggcaggggactgggaatgaagggaaagaaataaaactaaaagacaaaaggtttgcatagaccaatattgatgaagtgccacacactgaggagtgtgctgagctgcgtgaggtgcagagggaacctggaaaggagagagcaggagtatagaaaagtacagctcttgggaggctgaaggtcagatagtcaggtagcctggggtcaaatctgagctctgctgcttcccagctctttcaccttggacacgtcttccaagctccctcgcgtttctttttacgtcaaacaaggatacaagatgtatacacaagcagatagcagaattgctcctgacacacagtgggtacatgatgacattagtaaatttaaaactacaggccgggttttaaaactttagttttaacattagtaaatttaaaactacaggccggtggctcacgcctgtaatcccagcactttggggggccaaggcggatggatcacgtgaggtcaggagttcgacaccagcctaacaaacatggtgaaaccccgtctctactaaaaatacaaaaaagtagcaaagcgtggtagcaggcgcctgtaattctagctacttgggaggctgaggcaggagaattgcttgaacctgggaggcagaggttgcggtgagccaagatcacgccattgcactccagcctgggcgacagagagactctgtctcaaaacaaaacaaaaatgctacagagcaggaatgcacttccaagatctagtacaatgaatgtttctcaaatgcaagtggtaatttattaatgggtcatgaaataagtaatgggtcccaaacagcattaaaaagaaagattatcagagtacatttcactaaaagtatctttttatagaactgttatttcagttatatataatgagtactaaaatgcattttttccctatggcaggcaatcaaaaagtttgaaaaacatggatattgtccaaaggagttctacacctttgggcttcaagaaccagtaagtattccctgagacaaaagttgttcagggaggcaaccttttaatctataaagggcattcaaaaagaaacttttataatcttctcttactattgtaacataaaagaaaggacatttttaacattgtaaaaatagaacagaataacaggctttatgtaaaactcactactttgtacttatttttctcccttccctgtctttcggaacccgaggacagaatcccagaggtaggaatggactcactgaaggtcactgagtcagctgtgacagaggtgacacagaacccttatgtcctggcttcactttccaagctctgctcctcagaaccctaaggggtccacaaaagtggagcctagcaggtggggtctctagaatccccaaccctgttttactgggagtggccctgcttctgtgagatttcatttgaataaagaatttcactgtttaaaaaaaaaaaagaattagaaagctcctggggggcggaagccatgggagaatgctgcctcccaggatagggccagatcgcagaggttattatatttcaatttaaatttagatgtttttccctagtgacatgagggagctatttaggatttctaagcaagagagagaatagatcggggttgtgctgaaagataattactcaggtgcgagtgtaacagctggactggctgcataggaacagtgggaagtagagagcagctatttaaccattgcaaaggtcctggcatgaggctggggtgggggtgctgcctgaggcggcagggatgcagaagatggcacctcaaattctctggggttatggccagccaaagccaggctctccaagccataccccatatctccttttttctgctctaatacctgcttgggcagctctcccaggaacataggcatggggactccgaaggccctcacctgcagcgccagctggcagtcctcaatcaggccctgcaccaggtagtagcgtgcttcgcccagcagctcccccagttctctcgtactctccggcagtggcacagacccatcccgcaggtaattgaggattgtaccaaagtgacggccgctccggtcaatcagcacccaacctagtggggtggggagaggcagggggaaagatggctttgctgcgggacctggagctactaaattaaaaaaaaatttttgtagagatggagtctcactatgttgcccaggctggtcttgaactcctgggctcaagtgatcctcccatctcggcctcccaagtacttggattataggtgtgagccaccaaacctggcctaaattataagaaaaaaggattccagccaggcgcggtggctcatgcctataatcccagcaccttaggaggctgaggcaggcagatcacctgaggtcaggagtttgagactagcaggaccaacacggagaaaccccatctctactaaaaatacaaaattagctgggcttggtggctggtgccagctactcgggggggggcgaggcaggagaatcgcttgaagccgggaggtggagtttgcagtgagccgagatcgcgccattgcactccagcctgggtaataagagggaaactccgtctcaaaacaaaaaaataaaaaaagaaaagtaaagaaaagaaggccgggcacggtgactgacgcctgtaatcccagcactttgggaggccgaggtgggcggatcacctgaggtcaagagttcgagaccagcctgaccaacatggagaaatcccgtctttactaaaaacacaaaattagccgggcatggtggcgcatgcctgtaatcccagctactcaggaggctgaggcaggagaattgcttgaatccgggaggtgggggttgcggtgagccgagatcgtgccattgcactccagcctgggcaacaagagtgaaactccatctcaaaaaaaaagaaaagaaaagaaaagaaaagaaaaaggattccaaagccacaaaaaagtctgaatactgatctgtctcaaacctgtgccacagccaagaaatctctttaaaacatctccagcgagttctcccttaagtttttatacatattcaaccagataattaactcatccatatctggtctacagtcagaaggctctcaccatgagaaagttcttgcagaattaccttatcaataaactgttaacccccgaagttaattctcaccatcctatttaattaaaatgtctacctccccccgtccagttcactgccattttaacttttatattcttcatagagcttactatcaaaaaaagaaaaaagaaagaacttactactatctgcaattgcatatgcatatacattttgtttacttgcttattggtcttctgatctcccacttccctaaaaaaagggaatttccataattttgtcaggttcatttacctatctccagcactaactgatattttacaaatacttattggacaaatgaattcttcccttttttttttttttttttgagacagtctctctctgtcgcccaggctggagtgcagtggcgctgtctcggctcactgcaacctccgcctcccaggttcaagcgattctcctgtctcagcctcccgagtagctgggctacaggcgcacaccaccacgcccggctaatttttgtatttttagtagagacggggtttcgccatattggtcaggctggtctcgaactcctgacctcaggtgatccaccgcctcggcctcccaaagtgctgggattaaaggcgtgagccaccgcacctggccgaattcttcacctttgatacttgaaggcagatctccgcctctcaaatttttattctcctgctctcacagtcctcgttaacccctcccttaagactctcccactcccaaactccaaaacttcaaagtctcacttgggcacgaagggtccatacttgaatgcaacactccaagaaggtaaggttcacctgccaaggagacctgtccaccctccactctggtgtccctggcaaacccaaagcagcctccttctgcaatgtgtgtatacaggtggattcctagagtgtacagggacctgtgtcaggggaacacagaggcaaacaagatctcccagctctcctggctggctgtgagcagttctgaagcagagagggaaacaaaaggctgggcagtcggaagaaactgaggaaggctgccaggagtagtactgcaggcagcagggctagttcccaagtcttgagctgaggggtgaagggtgggagaggtggtcatgaggattatgaactgacacgttcaatcacttaccacagcgcctggcagttaggggttccgtaagtgttggttattgctgggggtaaaggattgggggaggagaagagaaattatgaatgagaaaggggaggagatgggatgtgggggctggagggagctgagaatgagttgactggacagtagcgggcagagagaaggggcatgaggagccccggtggtgagagactgcggggaacgggagttgggggtctggggtgggggcacggtaggggcgccgctcgtacctccggcatcggtcagcacctccacgcggccgctgaacatggctttgagcatggtgtcctgtcccgtgagggtgcgcagcgtggtgtagtgcaacgagccgcccacgttcagcttcacgtatttgctgttcggggtcagcggcttgagaccgtaggcggcggggccaggctcgagacccgagggcttgggggcttccagggacggggccgcggcggcagccgggcccgaggcctccgccgacatgccgggtagcagcggcggacggcgatcccaggatctctccgcgccctgcggcctgctcccgaagaccctcggccggcccccagcccttgggccagaccgctcggcgcacacgcccactcaccgcagctactctgcaagaccggccctccgccccatctcgctcgcaccacccggaagccggcgccgggcagctgcgcaggcgcggccccgcccctgaatgggggcggggctgcgagtatggagcatgcgcagtggcctcgctgggggatcccgtagaggtttggcgtgtggcctgcgggttccccgggcgggtcgacgtgcgctcctctctggtctcgagtcaccaggaccagatcgaggatgcggccgaccccctgcccgatgtggaaagcgaagtctccacctcgtgattgggtctctgctgtcagagagcttcacgagcttgaggggaaacagacagagaggtctgggcattgggcagtttcccgcctcccagccccgcgcactgaacagactgtgaccagaactgcgaacaaagcgcggagggaagctcttaaaggaggccaaagcggccgggcgctgtggctcacacctgtaaccccagcctgtaagcctagctactcgggaggccgaggcagaaggagcgcttgaagccaggagttggaagctgcagtaatccgtgatcggaccgttgcactctagcctgggcaacataacgtcctttgaaaaaaaaaaaaaaaacagaggccaaaacgggtagcagtggtgcccgggcaccaaggatggaaggcctctctgaggaggtgatgccgagctgaagctgggaagcggatgtgagggaagagttccaggcagagggaaggcaaatgcagagatcctcaggcaggaacactgaactgttctccgtatttgaggagcagagggcgtgtcagtggtggccgcagcagctgagcaaaggtcttagaatcccagctaatgtcgtgggacctagcacccaatcccaaaagaaagaagaatagataggaacccactgttgacaagaaggtgcactgagaagtgtttttatctgacccgatctgcatccagtttagaagccgatacatcagggatttaacaatctgtcttaatgtctagcaaggggggttgctggagggaaaacacagagtcagagttctatcttcagccctgccagcaggtccctgggagatgctagacgagtgacttttctctgggcgtggttggtgtaagggatgcacacgcaggaggaaggtcggagtgtaaatgtgtgacctgggcctgttactgggtataaatgggcctgtagtgaccgggagctcatgttctaccaaaggggttgccaattttctgatttcgagtgtggcggtgtaaaagagaaaagcaactgctgccagctgggagctggtttgcaccctcactccagaagccttgatgttgctaggagctgacctggcaccaacagcacggccatggtggtgtcctgttgagcaaaataatttcacaaaaaacatcagacaaggtcactctctgactgatctagaaaaagaccattccataataaagcctcaatacagaaacaagaacattgtccaaaccacaaaaattaccaacacaatcctctctcccacagcgtaagttactgctgctttttttttggttgttgtttttgtttgttttgttttgtttttgaaatgaagtcttgctctgttacccaggctggagtgcagtgatgcaatcttggcttaccacaacctccacctccaggttcaagcgattctcctgcctcagcttccagagtatctgggattacaggcacccaccatcatgcccagatcatttctgtatttttagtagagacggggattcaccaagttgcccaggtgagtcttgaactcttgacctccggtgatatgcccaccttggcctcccaaagtgctgggactacaggtgtgagccactgcacctggccactgctgcttctttaccaagtacagttttagcttgattcattcctcccatcttctagataagaattattaagataaccaaaaagaattatccctacttcctgatagcatccaacccagagcaaatgcccccctttttggacccgcctaggaagtcccctaatgaaagttccaatcctgtaataagtcctttcacacatgttcttgctgagatgtctgtggtgttcagcctcccttgttcaactacaggtgcttcctggtggtccttggttggagggtactatcagaaatggaggagcaacaaagattcagctgaagccctcactgcctgggactgggacccttgactcgtcattgtatgcacacctgaaactgcttatgtcgctgaggtgccaacctgctgatggttggaagctaattgagttctgatattgtgttgatacccttaagcattgggtttactttttattttaattaattaattaattaatttttgagacagagtttcactcttgttgcccaggctgaagtgcaatgacacgatctcggctcaccgcaacctccgcctcctgggttcaagcagttcttctgcctcagcctcttgagtagctgggattacaggcatgcaccaccacacctggctaattttatatttgtagtagagacagtttctccatgtttgtcaggctggtctcaaactcctgacctcaggtgatccacccgcctcggcctcccaaagtgctaggattacaggcgtgagccaccatgcctggccatattttttatttttcattttttactttttgagatagggtctcactctgttgaccaggctggagtgcagtggtacgactcagctcactgcaacctctgcttcccagctcaagtgattctccagtttcagcctcctgagtagctggcactaaaattaaccaatgccggttaatttttttttttttttttggcgggggacagagtctcgctctgtctcccagagtggagtgcagtggcgctatctctgctccctgcaagctctgcctcccgggttcaagcaattctcctgcctcagccttctgagtagctagggttacaggcatgcgccaccacacctggctaagttttgtatttttagcaaagatggggtttctccatgttggtcaggctggtctcaaactcctgaccccatgatctgctcaccttggcctcccaaagttctgggattacaggcatgagccaccacacccaggaatgccggttaagttttatatatatatttttttgtagagatagggtttcactctgttacccaggctggtctcaaactcctgagctcaaagcaatcctcccaccttggcttcccaaagtgctgggattatagatgtgagccaccatgccctgccaagcattgggtttatttggtttttcagtttttttactcctggaataaggcccccacactggatttttggttatctgatcaaatatttattttgtccttggtgcaattgttttctgtccttctacactcattcctatggtgttttcttgtctagtattttgaatattgtttgtctataagaggcaaagtcgatataaaaaggatggatgtaggctgggcgcggtggctcaggcctgtaatcccagcaactttgggaggctgaggtgggtggatcacctgagatcaggagttcaagaccagcctggccaaaatggtgaaaccccgactactaaaaatgcaaaaaattagctgggtgtggtggcaggtgcctgtaatcccagctacttgggaggccaaggcaggagaatcgcttgaacttgggaggcagaggttgcagtgagccgagttcgtgccatggcactccagcctgggcgacagagaaaaaaaaaaaaaagtctctgtctcaaaaaaaaaaaaaaaagaaaagaaaaggatggatgtgtagcctcggatgtctaagggcatcacaaacctattattgctgaatctctggtgaccgaacacaacttatccctctaggaaggtagggatgccaactgttgaggggttgtgcaactagttagcatccgagagtcttatttgttatcagaattaaccagagaaatcactccagcaaccaagagccagtaagtgtgtcctacaaccagctccagagactgtacaattcggaaggtattctcagactaatgtcctttgggtaaactttgcccaggtcaccatttcttttttgtttttgttttttgagacagagttttactcttgttgcctgctgaagtgcaataggacaatctcagctcagctgcaacctccacttcccgggttcaagtgattctcatgcctcagcctcctgagtagctgggattacaggtgcctgctaccatgtccggctaatttttgtatttttgatagagacagggtttcaccatgttggccaggttagtctcgaactcctgacctcaggtgatccacccacctctggctcccaaagtgttgggattacaggcatgagccaccacgcccagccccaggtcaccatttcaaagccttgaaaaggatttctttggttttgtctatgtccttgcaaactgctttgtttcatttcttctgctcagtatcagggggctttctctggcctctgatcagcgatggtgtttggccacattctagagatacgaagttgtataagcaccattcttttagaccccagtcacaactaaaattgggccaaagacctgctcccttcatgttttctcacgattgcaataacatgtacccatatatctgtaactgacacaatttcaccagggacagtttgtaattgccgtagccatttggtggaacttttgataataacaagattgttcatttgggaggtgcctcagaacacaaagggaagaaacctttgtgagattgtttgccttgtttgttaaaaacaaagattattttgtttaacataggcaatatttcatttacctattttgcatattaataaatgctgtcggccaggcacagtggctgacacctgtaatcccagcactttgggaggctgaggcgggcgaatcacttgaggtcaggagtttgagaccagcctggccaacatggtgaaaccccgtctctactaaatatacaaaaatcagccaggcttggtggtgcgcacctgtaatcccagctactttggaggctgaagcaggagaattgtttgagtccatgaagtggaggctacagtgaactgagatcatgccattgtactccagcctgggcaacaagagcaaaactccatctaaaaaaaaaagaaggccctcaccagatgtggctgcttgactttggaattcccaccctccagaactgtaagaaataaatttttaaaaataaagtacccagcccctcaggtattctattgcaacacagaatggactaagacagtgtttatatgtcaaaatctattttcctgtgtttaaactgtcttccttctccttgcagagggaatataaccttagccttttggagtgataatttcatgtttgtctgaagtagcttcttctcacattttctttttttttttttttatgttcaaaatgcttttatttctaggaatttagttttatttttaattttttaattattatactttaagttttagggtacatttgcacaacgtgcaggtttgttacatatgtatacatgtgccatgttggtgtgctgcacccattaactcgtcatttagcattaggtatatctcctaatgctatccctcccccctccccccaccccacaacagtccccggtgtgtaatgttcctctttctgtgtccatgtgttctcattgttcaattcccacctatgagtgagaacatgtggtgtttggttttttgtccttgccatagtttgctgagaatgatggtttccagcttcatccatgtctctacgaaggacatgaattcatcaatttttatggctgcatagtattccatggtgtatatgtgccacattttcttaatccagtctatcattgttggacatttggcttggttccaagtctttgctattgtgaatggtgccacaataaacatatgtgtgcatgtgtctttatagcagcatgatttataatcctttgggtatatacccagtaatggaatggccgggtcaaatggtatttctaattctagatcactgaggaatcgccacaccagcttccacaatggttgaagtagtttacagtcccaccaacagtgtaaaagtgttcctatttctccacatcctctccagcacctgttgtttcctgactttttaatgatcgccattctaactggtgtgagatggtatctcattgtcttctcacactttcctgctgtccatttcattctctttttcctcacctctcttggaaagctttaaagattaactaatcaaaaaatttttcagttgtatgtgcacagtctaggtaaatccagtcctaaaagaaatagaaatgcctaaaatgctaaaagaaacagaaaatcatatatatatacgtatatacatgtatatcaagatcagcttgggtaacatgtgagaccctgtctatacaaaaaaaaatacatgtatatacgtatatatatatagtgtctgtacatataggcactaaaaagtatatttatgtaatagcctttgctcttccagttagaagaaaagatctatcacgcctgtagtcccagcactttgggaggccgaggagggcggatcacgaggtcaggagatcgagaccatcctggctaacacggggaaaccccgtctctactaaaaaaaatacaaaaaaattagccaggcatggtggcgggtgcctgtaatcccggctactcaggaggctgaggcaggagaatcgcttgaacccaggaggtggaggttgctgtgagccgagattttgccactgcactgcagcctgggcaacaagagcaaaaactccatttcaaaaaaaaaaaaaaggtcttagttccaagacaaaagaagagcttttggcatgattcagttaaattttttattcactcatgtaaaaatgatgccagcgtgatattttggtttgtacaagaacagggttaattctctttctctctctctctctctctgagacagggtcccactctgtcaccccatctggactgcagtggcatgatcatggttcactgcagcctcaaccttctgggctcaagagatcctcctctctcagcctcccaagtagctgggaccccaggcacacaccaccatgcccagccaattttttgttgttgttgtatagacagggtctcacatgttacccaggctgatcttgagctcctgggctcaagcagttctcccaccttggcctcccaaagtgttgtgattacagacatgaaccactcactgctcctggccctcatgatttaagccttctcaatgtatttatgttgatcttatgagttaagtaaattgtgatggttttcataaattgtttaaatgaaaattatacacaggcactccttgttttattacacctcactttattgctcttcacagatattgcatttcttacaaattgaagatgtgtggcaaccctgtgttgagcaagtgttttttgtttgtttgtttgtttgtttttgcagtggagtcttgctcaggaggctgaggcaggagaatcacttgaatccaggaggcagaggttacagtgagccaagatcgcatcactgcactccagcctgggcaacagagcgagactctgtctcaaaagaaaaaaaaaaactggaacagcctgattgctgatatggagaaagttttagtggcctgaatagatcaaaacagccacaacagctctaaatctcttcattactatgaagactgagagggattaggaagctgcaggagaaaaatttgaaggtagcagaggctagttcatgagatttaaggaaatgagccatctgcagaacataaaagtgcaagatgaagcagcaagtgctgtgtagaagctgcagcaagttatccagaagatctagtaagataattgatgaagatggtttactaaacaacagatttccaatgtagacagaacagccttctattggaagaagatgccatctaggaattttatagctagagaggagaagtcaaagctttgaaggacaggttgactctcttgtcagggactaatgcagctggtctggtgactttaagttgaagccaatgctcattaaccattttgaaagtcctagggccctgaggaattatgctaaatccattctgcctgtcccctattaatggaacaaaaaagcctgaatggccacatgtctgtttatagcatggttcatggaatattttaagcccactgttgagacctagtgctcagaaaaagagattcctttcaaaatattatgacagttcctctggtcatccaagagctctaatggagatgtacaaggaaattaatgctgttttcctgcctactaatgcagtatctgttcttcagcccataagccaaggagtaatttcaattttcaagtcttcctgcagttgacccttgaacattgtgggggttaggggtgccaaccccaacacagttgaaaatccatatataactatttttcttttgtagagataaggtcttaatatgttgcctgggctggtcttgtactcctggcctcaagcaatcctcccacctcagcctttttctttttttttttttttttttgacagagcctcgatctgtcacccaggctggagtgcagtggtgtgatctcagctcactgcaacctccgcctcctgggttcaagtgcttctcttgctccagcctcccaaatagctgggattacaggtgtccgccaccacacccagctaattttagtatttttaatagagatggggtttcaccatgttggccaggctggtcttgaactctgaccacaagtgatctgcccacctctgcctttcaaagtactgggattacaggtgtgagccactgcccctggccttggcctcatataacttttgactccccccaaacttaactaccaatagcctactgtgaaccagaagccttaccaataacagaaacagtcaattaacacatactctgcatgttttatatattatatactgtagtcttacaacaaagtaaagtagagaaaagaaaatgttattaggaaaatcataggaagagaaaatatatttatggtactgtactgtattatgtataccataagtttatgtcgtatgtttataagatgaatcatctgtctgaaatggtgggcagccacagctgcagaccccaatccacattacatatcaagcagttgaacttttttttgtaatgtcatgactttcccctgcttcttagaagcacttccagcatgactagtggcacttcacgtgggtcccgtggtgttatacaaggcttacagtattgcactaaacacaataaagaacacaggagaaccacaagagatcactttttactgtaatacataatttactggagagataaactgctcatgtggagatgattagcatcacatagcatttaaaaaattattttttctgctgcactttaaaaattcttttactttttttttttattattattttgttgatgttgagatggagtcttgctctgtcacccaggcaggagtgcggtggcacgatcttggctcactgcaagctctgcctcccgggttcacgccattctcctgcctcagcctcctgagtaagctgggactacaggcgcccgccacaacgcccggctaatttttttgtattttttttagtagaaacaggatttcctcatgttagccaggatggtctcaatctcctgaccttgtgatccgccctcctcagcctcccaaagtgctgggattacaggcgtgagccactgtgcccggcctgctaattttttaattttaaattattatgggtgtattagtccattttcatattgctatgaagagatacttgagactcggtaatttataaagaaaaagaggtttaatagattcacagttccacatgtctggggaggcctcaccatcatgacagaaggcgaaggaggagcaaagacacgtcttacatggtggcaggcaagagagtgtgtgcaggggaactgccctttataaaactatcagagctcatgagacttattcactatcatgggaaccgcatgggaccatcttggttcactgcaacctccacctcccaggttcaagcgattcttgtgcctcagcctcccaagtagcggggattacaggtgcctgccaccatgcctggctagttattgtatttttagtagagatggggtttcaccatgttggccaggctagtctcgaactcctgacctcaggtgatccacttgccttggcctcccaaagtgctgggattagaggtgtgagccaaatttttcttgagttacaaaagaagaccatagagagtcaaaggtaacaggatgaagataaggaagatcagataaagaaaactttaattaaaagggtattaaagacaataacaggcaatatgaataacagaacaaagggtaggaaaacgggtaatgcacagccatagaaatgaacaaaatcatgtcctttgcagcaacatggatgcagctgaaggccattatcctaagtgaattaacacagaaacagaaaacctaatatcatatgttcttacttgtaagtaggagctaaacattgagtacacatggacataaagatgagaacaatagaagctgggaactgcagaggggaggaagggaggagaaagggctgaaaaacttgctattgttccctacttgggcgatgtgatcagcagaagcccaatcttcagcatcacacaacatgtcctggtaacctctgcatataaaattaaattaaattgaaaaaaaggaaaagggccaggtgtggtggctcacatctgtgatcccagcactttgggaggctgaggcatgaaaattttttgaggccagaagttcaagaccagcctaggcaacacagcaagaccctgtctctacaaaaaaaaaaaaattttaaattggctaggtgtggtgatgtatgcctgtatgtctaactactcaagaggctgaggtgggaaaaaattgcttgagcccaggagatcgaggctacagagagctatgaccaccactgcactccaaactgggcgacagagtgagatgaacccatcacccccctaccataaaaaagcagaagaagaaaggaagaaaataaaaaaggtaccgagtaatcaaataactaatcttgttctgttgtattccgcaggagaaggtgacatatgtcttttcatttgggaaatgtgaatccaaggatcaacaaacaagttttattattgtgtcagttacctgttaagatactttccttggccaggcttggtggccgacatctgtgatttcagcactttgcaaggctgaggtgggtggatcacttgagaccaggagctcaagaccagcctgggcaacaaagggagacctcgcttctaaaaaaattaaaaagattagccgggcattgtggtgtgcacctatggttccagctacttgagagactgaagcaggaggatcctttgagctcgtgaggtagaggccacagtgagccttgatcatgccattgcactccatcctaggcaaaagagcaagaccccatctcttaaaaaataaataatactttaaattttagaatacattgcatgaaacttaccatcttggcttttttttttttttttgagacagagtcctgctctgtcgcccaggctggagtgcagtggcgtgatatgggctcactgcaaactccacttcccagattcaagcaattcttatgcctcagtctgctgagtagctgagactacaggcacacatcaccacgcccagctaatttttgtatttttagtagggacggggattcaccatgttggccaggctggtctcgaactcccgacctcaggtgatccgcctgtctcggcctcccaaagtgctaggattacaagcatgagcggctgtacctggcccatcttggcaatttctttttttgaaatggagtttcgctcttgtcaccaaggctggtgtcaagtagctgggattacaggcgcccgccatcatgcccggctaatttttgttttgttttgttttgtttttgagatgaagtttcgctcttgttgtctaggctggagcgcaatggcgtgatcttggctcactgcaacctctgcctcccaggttcaagcgattctcctgcctcagcctcccgagtagctgggactacaggcgcccgccaccacacctggctaatttttgtatgtatagtagagacagggtttcaccatgttgaccaggctggtcttgaacttctgacctcaggtgttccacccgcctcggcctcccaaagtgctgggattacaggtgtaagccaccgtgcccggcctaatttttgttttttttttaatagaggtggggtttcaccatgttggccaggctggtctcaacctcctgacatcaggtgatccacctgccttggcctcccaaagtgctgagattacaggcgtgagccactgcacccagccaacatcaacaattttatagaacaccacgacagagacaaggccactctatgactgtggtggatcagacaaaaacaaagccactgtgtactcatgatgtctgaacacagacaaaaacaagaacattgtccaaactatttagtcctgctcctttctcccacctttcagttgaaaattacggtactcagacatagaattacctcttcctggccgggtgcggtggctcatgcctgtaatcccagcactttgggaagccaaggcaggcagaccacgaggtcaggagatcgagaccatcctggctaacacagtgaaaccccgtctctactaaaaatacaaaaaaaattagctgggtgtggtggcgggcacctgtagtcccagctactcgggaggctgaggcaggagaatggcatgaacctgagaggcggagcttgcagtgagccaagatcgcgctgttgcactccagcctggagacagagcgagactccatctaaaaaaaaaaaaaaaaaagaattaccccttccttcctgatgcatccaaaccagagcaaaccctcttgcctcaaatcctctcctgaaacataacacgagcataagtcctacaataagtctttttttttttttttttttaattagacacgtggggtttcactatgttgcccaggctggtcttgaactcctgggcctaagcgatcttcctgccttggcattccatattgctgggcttacaggcgggagccaccatgcccagtctaagtcatcttcaacacctctttctgagatgccttagagttccccatattatgtgggtctgcctcattgctatgagtccgtaaaactgactttgttttttgttttgggttgtttttttttttttttttttagacatggtctcattctcttgcccaggctggagtacagtagtgcaatcatgacctactgcagcctcaacctcccaggctcaggtgattctcccacctcagcccccttgagtagctaggactacaggcacatgccaccacaccccactaattttttgtattttttgtagagatggagtttcatcatgttgcccaggctagtctcaaacccctatgttcaagcaatcctcccaccttagcctcccaaagagctgggattacatgcatgaaccaccacactcagtcccccaacgttgttttaaaactttcttttaggtgtgttcttggtggcccttaacagaaggacattgacactggaatctggatgtttgtttgttttggagacaggatcttgctctgtcacccaggctggagtgcagtggcacaatctcggctcactgcaacctctgcctcctgggttcaagcgaatctcgtgcctcagcctcccaagtagctgggattacaggtgcctgccaccacacctggctaatttttgtatttttagtagagacagggattcaccatattggccaggctggtcttgaactcctggcctcacgtgatccacccacctcggcctcccatagtgctgggattataggtgtgagtcactgcacccggcctggatttttttttttcagtgaaagatactgattttttttaagttgactcaaagcaagttttaaacactctgtgtccacttcatgttgctatcacagaatatcacagtctgcgtagtttaggaacaatagacatttatttggcttatggttctagaggctgtgaagtccaagatacaggagctgcctctggtgagacatcatcacgtggcaagagagcatgagagagagaaagagggggctgaatttgcttttataacaaacccattcctgaaataatggcattaatccattgacctaattgcctcttaaggatctcacctctcaacagtattacatcagggattaactttccaacacctgagatttgagggactcattcaaaccatagtactctgaaattggatatataggtctatgggtgagattcccactgagggttgccagtttgcaacctttcagttgaatggtctccctcctggatgtcaaggttaatactgctatgaacagctattatgcacctaagttgaaccagggagagaacacatccttccgcatgtactattttatttaatgttattttctactaagtcattcagaactctctggactctcttcatgctgtgtaatttgcaaggttgcctgctgcatgtttggttataaatgaggtcaaatcccaattttgcaggaggacgtggatgtatgcccattcccttcacactgtgagccagtagccatgggaactataatcaagtacacaataactcccccatgaacaaatcctcagggaacaagcttcaattgaatgaaactggcttgaccacagaggaatctgggggactttctgagcttcgcggacttgtgccgcctcctgactttaagctggctctggaggaggaggaagtggaggtatctcaggtatggacctctttctggaagctgggacttggaccaggcaaagaaaggaggcggtggggaaaattcccccagagaaggcaggagtgggccctgcataccaggtccccaggtctctgagagctttactagttctgggagtgtgtggatcaagcctaaagtctagaaggaattctagcatcacccagggcgttggctggaatatctttaaggacccttccagccctggaatcatagcagcaaaggacccaattgtatgacagctgctttggccagtgaagatggaaagaccaggaaaagctttaggctaagcaatggagttcacaccccgctaattcacctcccttgcggcatccctgacatttcccacacaatatgtccttcattctgttctccaaaaagccattgccttcctctaactgactgagatgagccctggaaaccctgatgcccaccagacccctgcctttcctcttctctgctgttggccaaggtttctgcctcagttgccctgtctgacaatacagtttccctaggactggagctagccctggcatcccagaatccccaacaggtgctagcccctggagtcaggactgtcttcctgtgtccctgtgcttgctgcagaataaactgattacttttaactaccattctgaatatagtcactaccaggaaccgctgactacctgtgacataccatctagcatggtaccacagcacctggcccagcatcttgggaggccaaggtgggaggactgcttgagggcaggagtttgagatcaacctgggcaactacatagtgagaccccacctctacaaaaaatttcaaaattagccgagtgtgattgcacatgcctgtagtcccagctacttgggaggctgaggcaggaggatggattgagcacaggaagtggaggctgcagtgagctatgattgcaccactgcactccagcctgggagacaaagggagattccgtacataaataaacaaataaataaaaaacaaaggagatggatttttttctacaagagagttacatgcagggtgctaggtactataggtggagacttgccgaggttcagtgggaatgggagctcaatcctgagagtgggggaaggcattacagaggctgtgacctttgagactggtcttgaagaaagagaaaatgtgtacaaggcagaaagaagggagaaagttacccgaagagagaactgcaccagccaaaaatatggaggtatggagtaggtagaattgtgagacatttatgtgactggagtgaaaaatgagagatgatgctggaaaggagagttaaggccaggttttgaaggatctcttaaaaaaataataggctggcgagattgtgccactgcactccagcctgggcgacagagcaagactccgtctcaaaaataataataataatagtaataataggctgggcacagtggttcacacctgtaatcccagcgctttgggaagccaaagcgggcagatcactcaagatcaggagttcaagaccagcctggccaacacggcaaaaccctgtctctactaaaaatacaaaaattagctgggcgtggtggtgtgcacctgtagtcccagctactagggaggctgaggcagaagaattgcttgaacccgggaggcgaaggttgcagtgagcagagattctgccactgcactccagcctgggtgacagagcaagactctgtctcaaaaaattaataatgataataatacattaattttgagataagatcttgctctgtcgcccaggctggagtgcagtgatataatcacagttcactgcagcctcaagctcctgggcttaagcgatcctcctgcctcagcgtcccaaggtgctgggactacaaccatatgacactgacggagcaagagcactgtcatctgggacaaacaccgcccctttaagttacagctccctttctagcctcatgcatttcaaggaaatcacttctcttctaactacaagcagacagaaagagcagacaggaaaacgcagataagacagtttgggcatagagggaggtgggggcaaagtctcttgggtaactgccaaacttcaccctcatacaacgggccccagtaaaacagtgggccttaggccgggcgtggtggctcatgtctgtaatcccagcactttgggaggctgaggtgggcagatcacgaggtcaggagttcgagaccagcctgatcaacacggtgaaaccccatctctattaaaaatacaaaaattagccgggcatggtggcgcgcgcctgtaatcccagctactcaggaggctgaggcaggataatcccttgaacctgggaggcagaggttgcagtgagcctagatcacgccactgcattccagcctggacaacagagagagattgtctcaaaacaaacaaacaaaaaaataatgggccttaataagcacatttctttcccttcagttgcactaagatagggaagttaaaagcagactcaggggatatgcctatagctgcagaaaaaagataagcacaagataagcacaacaaagagacacagaagcagtccaagcctctgataaactctcccaccctgaatccttacaaactctttgtaagaaagggtggctctgacctaacttggccagctgccaagtttattattcaaaataaacctgtccctgatgactgtcaaaccacccttcatgtttctctcctctttctttaattcttacagccaccacgcctggctaatttttttgaatttcactggaggtcttgctgtgttgcccaggctggacttgaactcctgagctcaagtgatcctctcgcctcagcctccgagtgttgggattgctggaggatcatatctgtttccaaaggtggagctttctgctggaggcagcagagttcttcaggcagagcagctgagtcttgaggttgctcttttaggaaacaaactcaggaggcgctgtggaagatgcattgaatggagtaggaggtggaggcagcgagaagggtgaggagacactgctgagccctgatgagagacaaagaatgtctgaaggaagcaaagggaatggagaggaggggaaggctttgggaagactgtgatgcatggaatgcgtgggataagggcagagggtggagtccaggctgactcagaggtttattgcctgggagactgggtagatgattacactgtaacctgagatgaagatacagtaagaggagtttatatgaagaaaaagtaggccaggcgcagtggctcacgcccataatcccagcactttgggaggctgaggcgtgtgaatcaccttagccccagagttccagatcagcctgagcaacatagagaaatctcatctctactaaaattcaaaacaattagctaggtgttgtggtgcagacctgtagtcccagctacttgggagtctgagatgggagaaccgcttgggcccaggaggtcgaggctgcagtgagtcatgatcgtgctactgcactccagcttgggcgacagagcaagacactgtctcaaaaggaaaaaacagaaaaagtaataagctcagtttttaaacagaaattgtagtagaatacaatgtaaaatttaccatttaaccattttacagtgtacaattcagtggcattaagtaaattcacaatgtttgaaagcatcaccttgatctagctccaaaacattctcatcaccccaaaggaaacccccaaatccattaggcagtgattctctattcccctgtgtgcccagcccctggcagtccctaatctccctgtagatttgcctgttctggacatttcatatgcatggaatcatacgatatgtgactatagtttatggctggccactttcacttagcacaatgttttctttctttcttttttttttttttttttgagacggagtctcgctctgtcacccaggctggagtgcagtggcacgatctcggctcactgcaagctccgcctctcggggttcacgctattctcctgcctcagcagagtagctgggactacaggcgcccgccaccacgcccggctaattttttgtatttttagtagagatggggtttcaccgtgttagccaggatggtctcaatctcctgacctcgtgatccgcctgcctcggcctccctaagtgctgggattacaggcgtgagccactgtgcccagccagcacaatgttttcaaggttcatccatgttatagtatgtatcagaattcttttttttggagactcagagccccattttttttggagactcagagtctcattctatcacccaggctggagtgcagtggtgcaatcttggctcactgcaacctctgcctcccaggttcaagtgattctcctgcctcccgagtagctgggataataggcaaacgccaccatacccagctaatttttgtatttttagtagagaaagggtttcgccatgttggtcaggctggtctcgaactcctgacctcaagtgatctatctgccttggcctcccaaagtgccgggattataggcgtgatccaccgcgcctggccccttacccatttttcaattggtcaattttctttttcttattgaattgtaagagttatttctatgttttaaatacaagtactttatcagatgtaagatttgcaaatactttttcccattcggtgagctgtcttttcaccttgtggctggtattcttttttttttttttttttttgagacagagtcttgctctgttgcccaggctggagtacagtggcaggatctcggctcactgcgagctccacctcccgggttcacgccattctcctgcctcagcctcctgagtagctgggactacaggcgcccgccaccatgcccggctaattttttgtatttttttttagtacagatggggtttcacggtgttagccaggatgctctctatctcctgacctcgtgatccacccgccttggcctcccaaagtgctgggattacaggcgtgagccaccgcgcccggccttgtgggtggtattctttgaaacacaaaactttttattttgatgaagtcccctttatctatttttacttttgttacctgtgcttttggtatcatatctaagaaatcattgccaaatacaatatgatgaagattttcccctatgttttattctaggatttttatggtttttgcacttaagtttagatctttgatccattttgagttaattttttgtatgtgagctaagctttctatgtggggtacagaaaagggctaacctcattattttgcatgtttcccccaccccctgcccaccaacatttgtcaaaaatacgaatcctttcccccattgaatagtctaaacaactattttcaacaagggaaaatagttgaaaatcaattgttgaaaatcaattaaccatatatgtgaggatttatttctgggttctctattctactccatttgtttctctatctacccttaggtcagtatcacactgggttttttcttttgtttgttttaactttttaaatttcttgtttttaatttttgtgggtacgtagtaggcatatatatttatagggtacaggagatactttgatagaggcatgcaacgcataataatcacatcatgataaatggggtatctatcccctcaagcatttatcctttgtgttacaaataacccagttaaattctttcagttattttaaaatatacaattaaattattattgactggcctggcgcagtggctcgtgctgtaatcccagcacttttggaggccgagatgggcggatcatttgaggccaggagttcaagaccagcctgaccaacatggtgaaactccatctgtactaaaaagacaaaaaaagttagccaggcctcaggcgcctgtagtccccactactcaggaggctgagacaggagaatggcgtgaacccaggaggcagagcttgcagtgagctgagatcgtgccactgcactctagcctgggtgacagagcgagactccatctcaaaaaaaaaaaaaaagttagccaggcctaggggtgcacgcccatagtcccagctacttgagaggctgaggcaggggaattgcttgaacctgggaggcggaggttgcagcaagccaagatcatgccactgcactccaccctggttgacagagctagactccgtctcaaaaaaaaaaaaagaatggcctggcgctgtggctcatgcctgtaatcccagcactttgggaggccgaggcggggggcagatcatgagatcaggagttcgagaccagcctgaccaacatagggaaacccgtctctactaaaaatacaaaaattagccaggcatggtggtacatgcctgtagtcccagctactcaggaagctgaggcaggagaatcgcttgaacctgggaagcagaggttgcagtgagccaagatggcaccactgtactccagcctgggcaacagagcaagactctgtctcaaaaaaaaaaaaaaaaagaagaatcatattgctaaaaaaaatagtttttcattctgtctatatgtcataagtgagatgacttgaactccctaagcatatgtgtccattatttccaccattaaaatgaattaaggtgcttggcatgactgccccctgtttattagttctaatagttttttagtggagtctatgttttttctaaatataagatcttatcatctgcaaacaagaataatttttacttcttcctttccaatttggacgccctttgtttctttctcttgtctaattgttctagctaggtcttccagtactatgctgaataacagtggtgaaagtgggcatccttgtcatgttccagatcttagaggaaagtctttcgggttttcctcattcagtatgatactagctgtgggtctgtcatatatggtttttataatgttgaggtatgtttcttctacacccagttttttgagggtttttattatgaagtagtgttgaattttatcaaatgctttttcagcatcaattgaaatgatcatatggtttttgtctttcgttttgttgatatgatgtaccacattaattgatttgtgtatgttgaaccatccttgcatccctgggagaaattccacttcgtcatgatgatctttttttttttctgaggtggagtcttgctctgtcacctaggctagagggcaatggcacaatctcagctcactgcagcccctgcctcctgagttcaagtgattctcctgcctcagcctccccaggagctgggactacaggtacatgccaccacacccagctaattttttttattgtagagtcaacattttgccatttacccaggcaaaatgagtaacattgtgacctcctgggttaaagtgatcttcctgccttagcctatcaaagtattgggattataggcatgagctaccatgcccagccaaatactatcttattacccattattttaaactgataactgatgacaacttttttttttttttgagacagagtctcgctctgtcgcccaggctggagtgcagtggcacgatcttggctcactgcaagctccgcctcccgggttcgtgccattctcctgcctcagcctcccaagtagctgggactacaggcacccgccaccgtgcccaactaattttttgtatttttagtagtgacggggtttcactgtgttagccaggatgatctcgatctcctgacctcgtgatccacccgcctcggcctcccaaagtgctgggattacaggcgtgagccaccacgcccggcaaactgatgacaacttaacactggttgcataaacaaacaaacaagcaaaatgaaaaaaaaaataataaaaactctacactttaacttcctccccccctgctttttttttttttttttttgagatggagtctcactctgtcgcccaggatggagtgcagtggcgctatctcagctcactgcaacctctgccttccatggttcaagcgattctcctgtctcagcctcctgagtagctgggactacaggtgcacaccaccacacctggctaatttttgtatttttagtagagacggagtttcaccatattggttaggcttgtcttgaactccagaccttgtgatccacccgcctcagcctcccaaagtgccgggattacaggcatgagccaccgtgtccagcccccactgctttttaatgtggttccctttatgtcttattgtactatgccttgaaatgttgtagttattgtttttttattggttcattgtttagcttttctacttaagagtagttggccaggcgcagtggctcatgcttgtaatcccagcactttgggaggcctaggtgggtggatcacctgaagtcgggagttcaagaccagcctgaccaacacggagaaaccctgtctctactaaaaatacaaaattagctgggtgtggtgatacatgcctataatcccagctactcgggagactgaggcaggagaatctcttgaacccgggaggaggaggttgcagggagtcgagatcgcaccattgcactccagcctgggcaacaagagtgaaactccatctcaaaaaacaaaacaaaacaaaacaaaaacagataatggtagtttatataccaaaattacagtgttataataccctgtatttttctgtgtgcttgctattaccagtgaattttgtaccttcaaatgatttcttattgctcatgaacatccttttctttcagattgaagaactccccttagcatttctcgtaggacaggtctggtgttgatgaaacccttcattttcgtttgtctgggcaagtctttatttatccttcatgtttgaagaatatttttaccagacatactattctagggtaatttttttttcttttagcactttcaatgtcatgccattctttcctggcctgtaaggtttccactgaaaagtctgctgccagatgggaattggagctccattgtgtgtttttttgtttgttgtttgtttgtttgtttttctgagatggagtctcgctctgtcgcccaggctggagtgcagtggcgggatctcagcttactgcaaacttcacctcccaggttcaagcgattctcctgcctcagcctcctgagtaactgggactacagacatgcaccaatacacatgtgtgtgtgtgtgcgtgtgcgcgtgtgtgtgtatttttagtagagacggggtttcaccatgctggccaggctggtcgtgaacttctgacctcaggtgatccacccacctcagcttcccaaagtgctgggattacaggcgtgagccaccacgccttctaatgcattctttagtatgtcaattgcattttccaactctagaatttctgcttatttttagttatttcaatctctttgttaaatttattgatagaattctgaattccttctctgtgttattgtgaatttctttgagtttcctcaaaacgtcttttttgaattctctgtctgaaaagtcccatctgtgtttctccaggattagtccctggtggcttctttggttcatttggtgaggtcatgttttcctggatggtcttgatgcttgtcaatgttcatcagtgtctgcacattgaagagttaggtatttattgtagcctttgcagtctgggcttgtttgtgcccatcttttttgggaaggctttccaggtatccaaaaagacttgagctccaagcccaataacactgtggttcttgtggactcatataagtaccaccttggtggtcctagataagatccagatgaattctctgattactaggcagagactcttgttctctttccttactgtctcccaaataaatggagtctctgtctctttgctgagcttcctggagctaggggtggggtgatgcaagccttcttatgaccaccaccattaggactgtgctgggtcatacctgaagccagcacagcagtgggtctcacccaaggcccactgtaaccactacccgaataccatctatgttcactcaaggccctagggctctacaatcagcagctagggccaccagtctgatttctatctttcccttcagggcagcgagttcctccaggtcctgggagggtccagagataatgtctgggagccacggattagagtcaaaaaccttagaaatctacctggtgttctattctactgcagctaagctgggactcaaaccacaagacaaagtgcctcccactctaccttcccctttccatggacagaggacagaggagcctctcccagtggccactaccaccactggcctgcagagagttctgaacactcacttaaagcccaaggcctcttcaagtcaacttgtggtgaatgctctcaggcctgggactcaccctttaggacagtgggtccccctctggcccacagcaggtccaaaaatgttgtccaagagcttaggtctggactcggggaccccaaaaatctgcttggtaccctaccccactgtgtccgagctggtatctaaggggcaagacaaagttccctttactcttctctccacttttctcaagcagtagtctttcaccagggccaccacagctggtaatgtgctgggccctacctgaagccagcacaactcagactcttatccaaggtccacagatactacctgggtattgctgttggctattcagggaccaagggctccttagtcagcaggtgataagcccttccaggactgcgtcctcccttcaggacagcaggctcccttctggcccagcgcatgtctaaaaatgtcatccaggagctagggcctggaatgagggcctcatgactgcctggtgctctatcctattgcggctgatctggtatccaagatgcaagacaaagtcctctttactctttgctttcctctcctcaaacacaaggaaggagttactttcgttgctgtgagctatgccgcctggaatcgggggaagggtggtgcatgcactcctttagctgccccaactactgcctagctaggtcatgtgccatcctagtccactggctctaaggccagcccagcactaggacttgcctagaagttgcagtccttgtatcctaaaatgcctttcaaatttacctaggaccccagagcactttagcctgcagtggcaaggcttgccgcaacttgagttctgaccactaggatggacaattcccctctggttcgggctgatacaaatgctccctccttgggcaggcactggctgagtccagcatggctttgctctccactgtgacagggcagcactgagttcactggcaagtccctcagttcaatgccaagtcccccagtccatgtgctctctctcctccaagtgcacagtttctctctgtgccatgcagctactgctagggggttggggaggggtggtgtcagcgattcaagacagtgtttcctgcccgggcacggtggctcacacctgtaatcccaacactttgggaggccaaggcaggcggatcacttgaggtcaggccaacatggtgaaatcccgtctcactgaaaatacaaaaacccggcgggcgtggtggcacatgcctgtagtcccagctactagggaggctgaggcaggagaatcgcttgaacccgggaggcagaggtttcagtgagccgagactgcaccattgcactccagcctaggcaacagacaaagggagacttcatctcaaaaaaaaaaaaaaaaaaaaaaaggctgtctttcctaccctcttcagtgcctctttcagtgatatgaagttaaaatcagctactgtgaccactcacctgatttttggttcttatgatggttctgaggaggcttctattctgccatcttgctctgacttcccactacattgtgttttgtttgtttgtttgtttttgacattcactctgtcacctaggccggagtgcagtggccaaatctgggctcactacaacctctgtctcccaggttcaagcaattctcgtgcctcagcctcctgagtacctgggattacaggcgcttgcccccactccggctaaatttttgtatttttagatggggtctcaccatgttgcccaggatggtattgaactcctggcctcaagcgatcctcccgcctcagcctcccaaagtgctgggattacaggcatgagccaccacgcttggcccccctacagtttttgtttggttgtttgtttgagacagagtctagctctatcccccaggctggagtgcagtggcgaaatcttgtctcactgcaacctccgcctccggggttcaagcgattctcctgcctcagcctaccgagtagctgggattataagcactcgccacccagttaatttttgtatttttagtagagatggggtttcgccatgttgaccaggctggtctccaactcctgacctcaggtgatccacccaccttggcctcccaaagtgctgggattacaggcgtgagccactgcacccagcccctacactgttttgattatgatagctttgtagtaagttttaaaatcaggaaattgagtccttcaactttttttcaagaccattttggtattcagggtcccttgagattctgtatgaattttaggatgggtttttctgttccactgccctccagcctgggtgacagagcgagactccatctcaaaaacaaaaaaacaaaaaaaaaaatcatagggatttgatatgatttgttaggaatttgcattgaaactgcagatcgctttgggtagtattgccatcttaacactattaagtccttcaatccatgaatgtgggatgttttctcttttgggggtcttctttaatttatttcagcagtatattgtaattttcagtgtacaaatctttgagctccttggttaaatttctaagtattttattattttgatgctattgcaaaggaagttattatttaaatttccttttcaaattgtttgctgcaagtgtataaaatctgagttgattttatgtcctgcaactttgctgaacttaattctaaaatttttgtgtggatttcttatgatttttctatatataattatataatctgtgaaaagagatccttttacttcttcctttccaatgtggaagtcttttgtttcttcttggcgaattgctttgcctagaacttctagtactttgttgaatagaagtggtgagagcaggcatccttgtcttgttcctggtctgagggtacaagcttttagtctttccctgtagagtatgatgttagctgtggtttacggcctttatcatttggaggacattcctgtctatttctagtttattgagtgttttaatcatgaaaggggtttggctgggcgcagtggctcactcacgcctgtaatcccagcactttgggaggccgaggcaggcagatcacctgaggtcagaagttcgagaccagcctgaccaacatggagaaaccccatctctactgaaatacaaaaaaattagccgggtgtggtggcgcttccctataatcccagctactccagaggctgaggcaggagaattgtttgaacctgggaggcagaggctgtggtgagccgagatcacgccattgcactccagcctgggcaacaagagtgaaactccgtctcaaaataaataaataaataaataaataaataaataaataaataaataaataaaatcatgaaagggtgttcattttttcaaagccttttctgcatcaattgagatgaccatgtgttttctccccggttcattctattaatgtggtgtattacattgatttttttcttttttttaagacagagtcttgctctgtcgcccaggctggagtgcagtggcttgatctcagctcactgcaacatctgcctcccaggttcaagtgattctcttgcctcagcctcccaagtaactggtattataggcacctgccatcatgcatggctaatttttgtatttttagtagagacggggtttcaccatgttgggcaggcttctctcaaactcctgacctcaggtggtctggctgcctcggcctcccaaagtgctgggattacaggtgtgagccactgcacccagccacactttgcatattttgaagtgcatctatttacttagcattcgtgacttgaataatttcaccaaatgaataattttgggtagtttgaaattcgttcttccaattgttacaccttgtttggtgtttgtaataaacacgtaaaggtaaaaaaaaacagtttttctgtattctgccaatcatacttttatataataaatcatccatttttttcccataaaaaaaaagaaagttattgcttaatgttacagaatttctgtttggagtgatgaaaaagttttggaaatagtagtgacagttgcacaaaattgtgaatgtaattaataccactgaactgtgcacttaaaaatagctaaaatggccaggtgcagtggctcatgtctgtaatcccagcacttccggaggccaaggcaggtggatcacctgaggtcaggagttcaagaccagcctggccaatacggtgaaacctcgtctctactaaaaatacaaaaaattagccaggtgtagtggcagacacctgtaatcccagttacttgggaggctgaggcaggagaatcacttgaactcaggaagtggaggttgcagtgagccaagattgcaccattgcattccagcctgggcaacagagcgagatctgtctcaaaaaaaaaaaaaaaaagctaaaatggcaagttttatattatatatgttgtttaccacacacacacacacaaatactaagaaaaaaatcaggcagatcctcttctaacaacacttacagtctattaagtgaatctgggcattttaaagaaaaaaataactatttttggttacggaatcaggatagtagttgcctatggacacgggcagtggggactgactagaaagggaagggaaggaagttcttggacctagaagtgttttatgtcttgattggggtgtttagataggcattacatttgtcaaaactcatgaaattttatactttaagatctgtgcatttcactctatgtaaattttaccttagtaaaaaacaaaacaggctgggcgtggtggctcacgcctgtaatcccagcactttgggaagccaaggtgggtggatcacttgtagtcagaggtacgagaccagcctagcaacatggtgaaaccccatttctactaaaaatacaaaagaaattagctgggtgtggtggcaagcgcctgttatcccagctacttaggaggttgaggcaggagaatcgcttgaacctgggagctggaggttgcagtgaactgagatggacccactgcactccagcctaggtgaccgagcgagactccatctcaaaacaaaacaaaacaaaaaatgttagcaacttctaatcccttgacagtttatatataccgcagtgattttctcccacttctcactcacgtgggatcttatcatacagaggttttaaattttaaacaattaaatttatcaaccttcttcatttatggtttctatatttgtgtgtcttgcttcagaaagtatctcttattccaggtaatcatattatcctatttttaaattctattttggaataaatatttcttattccaggcaatcatattattctattttttttctatatttttattgttctttcctgtgtgggacatgtagctggtgggctagctgcagaccacgggcaagtttgctaacattgctaagtcttggttttctcatccataaaatagggataataatttgctttgttattgacatgatttaataaagtaatatttatttgtttatgtatttattttagagacagggtcttactctgttacctaggctgaagtgcagtggcaatctcggttcattgcagctcaagtgatccttctgccttagcctccagagtggctgggactacaggtactgggactacaggatgggactacagagtggctgggcatccagctaacttaaaaatttttttgggctgggtgcagtggttcatgcctgcaatcccagcactttgggaggccgaagagggattaagaggtcaggaatttgagaccaacctggccaagatggtgaaaccccgtctctactgaaaatacaaaaattagccgggcgtggtggcaggcacctgcagtcccatcaggaggctgaggtgggagaatcgcttgaacccgggaggtggaggtggcagtgagccgagattgcgccattgcactccagcctgggctacaagagtgaaactccaccttaaaaaaaaaaaaaaaaagccgggcgcggtggctcacacctgtaatcccagcactttgggaggccgaggcgggcagatcacgaggtcatgagatcgagaccaccctggctaacatggtgaaaccctgtctctactaaaaaatacaaaaaattagctgggtgtggtggcaggcacctgtagtcccagctacttgggagactgaggcaggagaatggtgtgaacccaggaggcggagcttgcagtgagcagagatcatgccaccgcactccagcatgggcaacagagcgagactccgtctcaaaaaaaaatttttttttggccagtcacgatgtgtcacacctgtaatcctagcacttagggaggccaaggcgggtggatcacttgaggtcaggagtttgagaccagcctggccaacatggtgaaaccccgtctctactaaaaatacaaaaattagccagggacagtggcatgcctctgtaatcccagctactcaggagactgaggcaggagaatcacttgaacccaggagttggaggttgcagcgagccgagatcacaccacttcactccagtctgggcgacagagcaagactccatctcaaaaaaaaaaagtctagatggggccgggcagggtggctcacacctgtaatcccagcactttgggagtctgaggcgggtagacggcttgagctcaggagttcgagaccagactgcacaacatggtgagaccccgtctctactaaaaatacaaaaagagagaaaaaaaaatagcttggcatggtggtgcacacttgtggtcccagctacttgggcggatgaagtgggaggattgcttgagcatggtgaggagggaggttgcactgagccaagattgcgccactgcccaccagcctgggtgacagaccaagaccctgtctcaaaaaaaaaaagaaacaaaaaaaaggtggggctcactggctcacacctgtaatcccagcactttgggaagcttaaggtggatggatcacttgaggtcaggagttcgagaccagcctggatgacatggcaaaaccctgtctctactaaaaatacaaaaaaattagctgggcctggtgacgcacgcctgtagtcccagctactagggaggctgaggcaggacaattgtttgaactcaggaggcagaggttgccgtgagctgagatcgcaccactgcactccagcctgggtaaccagagtgaaactctgcctccaaaaaaaaaaaagaagaagaagaaaaaaggtttaggcaaacatgcacttttcctgttgcttttttttttttttttgagatggagtttcgctcttgttgtccaggctggagtgcaatggcgtgatctcggctcactgcaacctccgcctcctgggttcaagcgattctcctgcctcagcctcccaagtagctgagattacaggcatatgccaccacgcccgaataattttgtatttttagtagagatggggtttctccatgttggtcagactagtcttgaactcccaacctcaggtgatcctcccgcctcggcctcccaaagtgctggggttacaggcatgagccactgcgcccagcctgaacatgccagattgtagttccaggaggccagagatcatgaatactttgtccaccactatattcccagcccacagaatacacagcctggcagccaacagatgcttattgaatgaacgagcctcaacagggctttctcattcccacatgccatgctgtggtcaggcttaaatcataacccaacttctgccacctaatatatgtatgaccttggttaaattaaaccagcagtccccaacctttttggcactggggaccagtttcatggaagacaatttttccaccaggggaggaatggtttcgggatgattcaagcacattacatttattttgcactttatttctattattattacattataaggtataataaaataattatacaactcatcataaagtagaatcagtgggatccctgagtttgttttcctgcaactagatagtcccatctgatgttgatgggagacagtgagagatcatcaggcattagattctcataaggagcaacctagatccctcgcatgcgcagttcacaataggattcatgctcctatgataatctaatgccgctactgatctgacaggaagcagagctgaggcggtaatgcaggcaatggggagtagctgtaaatacagatgaagcttctctcaccagccattcacttcctgctgtgcggctcagttcctaacacgtcacggactggtactggccccacggcccaggggttggggacccctgacttaaactaagggccagctttccagaataacatccactttgagggcttgttgagtggattaagtcaaaatgttggtatacttggctggtgcggtggttcacacctgtaatcccagcacttcgtgagtctgaggcgggtggatcacctgaggtcaggaatttgagaccagcctggccaacatgatgaaaccccatctctactaaaaatacaaaaaattaggccgggcgcggtggctcacgcctataatcctagtactttgggaggccaaggcgggtggatcatttgaggtcaggagtttgagatcagcctggccaatatggtgaaaccctgtctctactaataagtacaaaaattagtcaggtgatagtggcgtgtgcctgtaatctcagttactcgggaggctgaggcaggagaatcccttgagcctgagaggcagaggttgaggtgagctgagattgggctgttgttgagttgtaggagttctttatatattatagatattaaccccttataagatatatgatttgatatttcctctcattctgttggttgccttttcactgtcctttcctttttttgtttttgttttttgtggggcagagttttgatcttttgcccaggctggagtgaagtggtgcaatctcagctcactgcaacctccactccccaggttcaagcgattctccagccttagcctccggagtagctgggattataggcgcccggcaccatgcctggctaattttgtacttttagtagagatggggtttcaccatgttggccaggctggtctcaaactcctgacctcaggtgatccacccgcctcggcctcccaaagtgctaggattacaggcttgagccaccgtgcccagcctgttgtgtccttcgatgcacagaaaagactcttttctctactgaacgcccacagcacccttgtcaaaaatcatttgactagtcagggcacagtggctcacgcctgtaatcccagcactttgggaggccgaggcgagaggactgcttgaggtcaggagttcgagacatgcctgggcaacatggcaaatggcaaaaccccgtctctacacacaatgcaaaagttagctgggcatggtgggtggcgtgtgactaccggctgtctcaactacccaggaggctaaggcgggaggatctcttgagcccaagacgtccagactgcagcgagctttgattgtgccactgaactccagcctgggcgatgacagagcaaggctctgtcaaaaaaaaaaaaaaaaaaaaaaaaaaatcggccgggtgtggtggttcacgcttgtaatcccagcactttggggggccgatgcgggcagaccacgaagtcaagagatcaagaccatcccggccaacatggtgaaacctcgtctctactaaaaatacaaaaattagctgggcgtggtggcgtgcgcctgtagtcccagctactcggaaggctgaggcagaagaatagcttgaatccgggaggcggaggttgcagtgagtcgagatcgcgccactacactccagcctggcgacagactgagaccccgtctcaaaaaaaaaaaaaatcatttgtatatgcgaaggttttgtgccacaaacttttgtggctgttgatacaaacgacatggcctctgccttaaggaagccacagtcgaattaaatagattccgtttcaagtagcatctgtcctgtgtgcttagtgggcactgggcccatgttttcccacattttaccctttaagcttctgatccaaccggtgagatagataggatgatcctctttagtagaggggtaagcttagtcccctgagagcgcggctatggcttatgcgagggtacggacagtcaggatttgaacccaaagttcctggctccatgtgtcatgctacctccagtcagatgttctcacctccaaaacttgggcagaagtgaactgagatgctctctactgagcaactcttcagctccagcatcctatacattaaggagtcactaaaagtcagggtccacgagaaaggtgcagatcggggtgcacagaagagcggagtccaaaacaccactcccagccccagtggacagagtcctcaagtggcagccctgcaactctgagcggatgccgagtcctcaccgggaacccgggcgcggctggtctgtgctattggcgcgggtaggggacgcacagcccaaaaatgcccgcgacaagcttctggggcagttctcgccagtctctctggagggagcctacgggttctgcgacgtttctcgcacttgctccctggcctcgctcccgtttccacccctcccacggaggttttcctttctggtggctccttccttgggtgtccctttggtacgcccccaccctggcggtgagctgcgaggctggcgcccgcgtggccactgcgcatgcggacccggccgcggggcggggccgcgcgaggaggagggtcggggacggaagcgcagagcacggaccccgccccctcgcggccccgctcgtgacgtcgcggggggcgccggcctccgcccggccccgaggggtaagagcgagcggctggcggatccgacgcgcgagaccgggaggggacgagggcgttgcaatcgttcggggcgggggctttccggggagggggtgctcaggtgcaccagcggcggcggaccctcagactctgccctcccctccctttaacccccttccagccggacgggaggcggggcagggctgagcatttgtgacacctacatttccgtggctcccttcttttcccccgacccctgtttatctcttcgccttccagaagttcttttccatcaggccgtcgcaccttgcgtgggaaggagcaccccacttggaagcaggaggcggggttcagatcttggccctacccctcctgtgttaaagtccgcgagcctcagtttccctcacagtattttttgcctcgccttacccggttttgaggatctgtacgagaaagagaaaggaagtggacatttgttgaattcctgcatggccaaataccacgcagactgcttcatccgccacgtttaatccttattacttggtgttctcagaactcccatttcatggattcttaagctcacagagtcagtgaataacagaaagggattcagatctagccgtttagctgcacagtggagttcttctccagagtcttcccttgtctgggctctggctggaactattcctcagccaaatcctcgccccagaacagtgcttcctgtttctccagctgagaagtctccctttcagtttccttcttccagcacggagtacactgctctgcctccacttagattacttcagaaatgaaatgcagcaaatatttatccagcagtgcagggagttgaacttttggagtcgggaaccttggattcttgttctggctctgccacttactgtgtggccttgggaagtcctttgtcttctctgagctttcttttctctttgcgtaaaagcggtgctcttgtcccattctccctccctgtcttccagcaggctctccccggaggctcagccccctctgctccccatgggcaactgccaggcagggcacaacctgcacctgtgtctggcccaccacccacctctggtctgtgccactttgatcctgctgctccttggcctctctggcctgggccttggcagcttcctcctcacccacaggactggcctgcgcagccctgacatcccccaggtaagttccccacccccgtacccgctcttccttccaacctagacaggcttttgctgctaatctcatctcacccgtcttcttttgctcacaggactgggtctcttttttgagatcttttggccagctgaccctgtgtcccaggaatgggacagtcacagggaagtggcgagggtctcacgtcgtgggcttgctgaccaccttgaacttcggagacggtccagacaggaacaagacccggacattccaggccacagtcctgggaagtcagatgggattgaaaggtgagatcagaggctgggtgtggtggctcacgcctgtaatcccaacactttgggaggctaaggtaggtggatcatttgaggtcaggagttcaagaccagcctggccaacatgatgaaacaccatctctactaaaaatacaaaaattagccaggcatggtggcaggcgcctctaatcccaactactcgggaggctgaggaaggagaatcgcttgaacccaggagatggaggttgcagtgaaccgagatcgcaccattgcactccagcctgggtgacagagcaagactctgtctcaaaaaaaaaaaaaaaaaaaatcaggtgcggtggctcatgcctgtaatcccagcactttgggagtccgagaagggcagatcacgaggttaggagttcgagaccagcctggccaacatggtgaaaccccgtctctactagaaatacaaaaattaacctggtggtctggttgcggtggcccacagcggtaatcccagcagtttgggaggccgaggcgggcagatcatgaggtcaggagtttgagtccagcctgaccaacatggtgaaaccccatctctactaaaaatacaaaaattagccgggcatggttgcacgtgcctgtaatcccagctactcaggaggctgaggcaggagaatcacttgaagccaggaggcggaggttgcagtgagccgagatcgtaccactgcactccatcctgggcaacagagcaaaactcggtctcaaaaaaaaaaattagccaggcttggtggtgcaagcctgtagttccagctacttgggaggctgaggcaggagaattgcttgaacccgggaggtggaggttgcagtgagccaagatcgtgccactgtactccagcctgggagacagagcaagactccgtctcaaacaaacaaacaaacaaaaatacaaaaagtagccaggtgtggtggcaggtgcctgtagtcccagctacttgggaggctgaggcaggagaatcgcttgaacctgggaggcggaggttgcaataagcagagatcacaccactgcactctagcctgggcaacagagactctgtcccgccccgcgccccccccaccaccctgcgccaaaaaaaaaaaagtaaggtgagatcacagaggactgtggggtcgggtatcagaacactcagggctgggccctgcctctgacctcaccaatgatgaccttgggcacatccctggactttagtcacttctgtgattagggctttcagtgaacatgctgccgacagggtaggttttctatgaatgctttcttcctctgccagttctgatgttctttgagtctatccttggaggtaggatgaaatgggctaggtttgacctaatgttttctcatcctttagccacctcctcctagaggcccctttttccttagcatagttctgtatgccacaaaagatgcagaaaaaaattagacaccatcaatttccaaagagctatagtcttctgggaaaatgacaagcgatagggagaatgtgaaaatgtcagtggatgccaataatccctgtgtgacatttggccttatctaaaatatgctaagataaagagggatggaagagggtggtattttctgacttctgaggtcctttacaacactatcattctaagattctcctgtgagtatatatgtgtcgggggagtgggtctctgcatgtccagatgtacatgtatgttaacaaaaataaggaatgtgtccgatatatgcagacttgggacaattctttcccattctttttacttttaaatagatatataatagttttattgagatatgattcatgtaccatacaattcacccattgaaagtgtacagttagggccggatgtggtggctcatgcctgtaatcccagcactttgggaggccaaggcaggcagattgcttgagcgcaggtgttcgagaccagcctggacaaaatggcaagactctgtctctactaaaaatacaaaaaaaaaaaaaaaaaaaagccaggcgtggtggtgcacacctgtggtcccagctacttgggaggctaaggtgggaggattgcttatccctgggaggcagggcttgcagtaaacattctcctgcctcagcctcctgagtagctgggattacaggtgctcgccatcacgctcacctaattcccgccccccagcccaaggagtcttgctctgtcacccagactggagggcagtgatgcgatctcagctcactgaacctctgcctcccagtttcaggagattctcctgcctcagtctcccaagtagctgggattacaggcatgtggcaccatgcccagctaatttttgtatttttagtagagatggggtttcaccatgttggccaggctggtcttgaactcctgacctcatgatccgcccgccttggcctcccaaagtgctgggattacaggtgtgagccactgcgcctggccaatttttgtattttttatagagatgtggtctcactatgttgcccaggctagtttcaaactactgggctcaagtgatcctcctgcctcacctcccaaagtgctgggattacaggcatgagctaccgggtctggcgtattacccaattgttttatttactttctcttgattgctagtaaggttgagcctcttatggtttattgtctgtattcatgttgcctgtgaattacctgtttgtttcctttgttcctttttcttttaagttatttgtctttttcttcttgatttgtaggtctttattctagatagtaaaccttttgtcatttaaatatattataggtattttcaatatgttacttgtttttttaacttatctttcattgcatagaagtctttaatttttatgaggttaggtttatcactcttgtcctttattaaaacttttaggttttgtgtctttcataggaagcccttcctcattttaaaattagaaaatattctggccaggcgtggtggctcattcctataatcccagcctttggaaggctgaggcaggtggatcacctgaggtcaggagttcaagactggcctggccaacatgatgaaaccccgtctctactaaaaatacaaaaaattagccaggcatggtcgtgggcacctgtaatcccagctactcacaaggctgaggcaggagaattgcttaaacctaggaggtggaggttgcagtgagctgagattgcaccactgcactccagcctgggcaacaagagtgaaactctgtctcaaaaataataaaataaaataaaataaaataaaatattctgtattttctttaaatacttaagtttttttttagtttgtatagttctttaatacatctgaactttattttataagataacagtttgacgctatgtttttttctacatggaaattttcccaaggccatttactgaggccatcctttccccactaatttaaaatagggtgagaaccttttaatggattttggtaccaagtgagaaactgctttcttaaaaagaatgaactagtttatgcaaactgacatgggcaatgtgtatctgcccatttcactgcagccttgcgagtattagtatggttgttgtattgattgtaatttaagttaatttaaattacaacttaatttgtgtttatattgatacaaagttattttcatttctcagtgatataaataatggtatatggaatactttattgaatagaatcaatgccaaaacacctggtattatagaaagccttaaaaaatgactaggggcaggcgtggtggttcatgcctggaatcccaacattttgggaggtcagggtagcaggatggcttgagcccaggagtttgagtccagcccgggcaatacagtgataccctgtctctacaaaaaaatttttttaaattagccaggtaggtggcacacacttgtagccctgcctactcaggagactgaggtgggaggatcacttgagcctaggaggttgaggctcccgtgagctgggatcgtgccactgcactccaacctgcacgacaaagtgagaccccatctcaaaaaaataaagaaagaaagaaaatacaagaaaagggccgggcacggtggctcacgcctgtaatcccagcactttgggaggccaaggcgggcggatcacgaggtcaggagatcaagaccatcctggctaccacagtgaaaccccgtctctactaaaaatacaaaaaattagctgggcctggtggtgggcacctgtagtcccagctactcgggagactgaggcaggagaatggtgtgaacccgggaggcggagcttgcagtgagccgagattgcgccactgcactccagcctgggtgatagagcgagactccgcctcaaaaaaaaaaaaagaaaatacaagaaaagaagcgtgaagacagaggctcccgcgtcacctctcattttcttccattttctcttctgtgcctttcacaggatcttctgcaggacaactggtccttatcacagccagggtgaccacagaaaggactgcaggaacctgcctatattttagtgctgttccaggaatcctaccctccagccagccacccatatcctgctcagaggagggggctggaaatgccaccctgagccctagaatgggtgaggaatgtgttagtgtctggagccatgaaggccttgtgctgaccaagctgctcacctcggtaagagcctcagatgggtcgccagggttttgtagactgcctgctgactactgtatcttgaaggtccctggaaacaattctaccttgtagaaaaagcacaggttttataaccctgccttgggggctgtgtgacgtagaacaagtgtctaaacatctctgagtgtcagcatcctcatctgtaaaacagaaaacatgaccctatctcttaattccatcaaataaggattaaatgagaatgaccgtgaagtgcccagcacattgcctgggacatagagatttgataagtgacagctattgttgtttactattgtctttaaaacattctctctacttcaaaggagttcagaagctataataagaggcaaatgggctaattgctattagagagatgtgagcaaagtgttatgcaaacacagagaaaggagccattaaccctaacttgaacatttatggagagtgcatcacagagaaggtggcatttaccagagagcattgtgcacagtggtttataatgcacaaagtgctctcagggttcattaattcatttgatcttaaaatagccttttgaggtaggtgttattatcccattttacagatgaggaaacaggtttagagaaagggagtgaattgctgcaggccacacaactggttaagtggcagagccagggttgcaacccacaccttctgtcaagtcagaatgatccttgaagaatgaggaagatttggacagggactgcagtagaggaggttcaggagagggggaggtacactccaggcaaaggcaccagcatgcgcacaggcctagagattgaaaagtgttcagccaggtgtcacatctgtaatcccagcactttggaaggccgaagcaaggagaatgcctgaggccaggagttccagaccagcctggagaacatagcaagacctcgtttctttttcgcttttttttttttttttttttttgagacggagtctcactctgttacccaggctggggtgcagtggcacaatctcggctcactgcaagctccacctcacaggttcatgccattctcctgcctcaggctcccgagtagctgggactacaggcgcctgccaccatgcccggctaatttttgtatttttagtagagacagggtttcaccttgttagccaggatgatctcaatctcctgacctcgtgatccacccacctcagcctcccaaagtgctgggattacaggtgtgagccactgcgcctggcgaccccatttcttaaaaaaaacatttttttttttaattagcagggtgtggtggtacacacctatagtcccagctactcaggaggctgaggtgggaggatcctttgatcccaggagtttgaggctgcagtgagccatgattgtgccactgcactccagcctggttgccagagtgagaccctgtctcaagaaggaaaaaaaaagaaagtgttcagcctttgggagcactccatgttgagaggcttaggaaggagaaaaggcaagagagaccacagggatttgatggagaggctctgtgaatgcaggatagagggctatgacctgatgctgaaggccgtgggggccactgaggagttttaaggaggagagagatgtgcttccctggtgctgggtggagaatggctgagtggaggagggccatcagtcaggaggctgctgcacactccactctcacatttgaaaataccccatgaggcacggtggctcacgcctgtaatcccagcactttgggaggccaaggccggtggatcacttgaggtcaggaccagcctggccaacatggtgaaaccccatctctactaaaaatttaaaaattagctggatgttgtggcgggcgtctgtgatcccagctactcaggaggctgaggcaggagaatctctggaacctgggaggcagaggttgtagtgagctgagatcatgccactgcactccagcctgggcaacagagtgagactccgtctcaaataaagaaaaaaagaaaagaccccatgaggagcacaacctgggacttggaatcagagatctggtttccagatctagcactgcttgcactttttttttttttttttttgagatggagtcttgctctatcgcccaggcgggagtgcagtggcgcaatctcagcttactgcaagctccgcctcccaggttcacgccattctcctgcctcagcctcccaagtagctgggactacaggcgcccgccaccatgcccggctaagtttttgtatttttagtagagatggggtttcactgtgttagccaggatggtctcaatctcctgacctcgtgatccacccacctcggcctctcaaagtgctgggattacaggtgtgagccaccgcacccagccacttatacatctttaaactgtggatcataatgaagtttcctatctcatggagttatgatggggtttcaggttgataattgggcaagaaagtagtttttaaaccatcaagacaaatgttcgagcctgggcaacatggtgaaaccccatctctacaaaaaaacacacaaaaaattagctgggcgtggtggcacacacctgtggtcccagctactcaggaggctgaggtgggaagatcgctggagcccaggaggcggaggttgcagtgagccgagattgcactactgcactccagcctgagttacagagtgagaccctgcctcaaaaagaaaaaaaaaaaaaagggccaggcgcggtgtttcacgcctgtaatcccagcactttgggaggccgaggtgggcggatcatgaggtcaggagatcaagaccatcctggctaacacggtgaaaccccgtctctactaaaaatacaaaaaatgagccaggcgtggtggcgggcacctgtagtcccagctacttgggaggctgaggcaggagaatggcgtgaacccaggaggcggagcttgcagtgagctgagatcgcgccactgcactctagcctgggcgacagagcaagactccatctcaaaaaaaaaaaaaaaagacaaatgtcagcttatatgaaaataacattttcccttcagttgctccctagatgtggagagccctctccctcatggaggctccttctatagcccttggactggattaacatgtcctcctcctcctctccctgtacccctccctaggaggagctggctctgtgtggctccaggctgctggtcttgggctccttcctgcttctcttctgtggccttctctgctgtgtcactgctatgtgcttccacccgcgccgggagtcccactggtctagaacccggctctgagggcactggcctagttcccgacttgtttctcaggtgaggttctttgctccagtcctgcgggagcagggaatggggtgggggtgggggttgtaaccggggtagagcagatccttggacttttcctcaaagactgctgcttctgagtccccgagaacctcttcaaccacagctctcccttagggactgggaacaatttgacaccgtcagcattcaatatttttctaattactttaacttttttattataaaatagttaacacttatgtagaaaagtccaatagtataaaaggacagcttggcaaattattataaagtggatacttataaataccactgagtagaatattaccagctgtccagaaaccccccatggtcccttccttcctgacaatgccctctctctccctagaaattactgtcctgctttataatgtattgccatgtatgtattcctaaataatatagtttggttttacttatttttgaaactatgtagacagaatcatacacattcttttgtggctgacttctttcaagcaacattgtgattttaagactcataactagttcacatccaagcatttgggtaacaatggtgagttaagagggttcacatttgatgatttgtcctgaatatgaaccatgtttgtcttgcttttgtcctgaaattccaatacccagttttatgatggaaattttgtaaaattcaacttgaaccgctcagaagagtctaactgatgatactcatttactggggacatagtatgtgcccaagaacttgacatgcaccttctgtcttccatttagtcatcgttacctttagaaaaagctgattccgttaacaagatctttggagggaatcagcttcacaaacgtagcagtgggtgggggtcatgttggttaaccagttcacacatcagctcactaaaggaaaaaatatttctgcaaaaaatcttcacttgtcagaggggggtgcatgaaatttgagagccatgtgttatgcatccagctcttgaactggtctcagcttcagctggctgcagtgccctaggaagttactatgggaaaagtggaaatagttgaggcccagggaactgatcaggccagaggaagtggaagctcaagatcaactgtgcttattttgctgatggctgggcctaaatgccccaaccacctacttgggacaggaaatgacaggaccctctcaaccttggactgggaaaggagggcttcctggcccctgacagaccctggggtcctgaggctaccttagttgggattaaatgcccgtattggtctctagctgtcactccctctgctccttcctcaatttctgcacacatctcagagcttcctctagcagctcttcgacctgttttgttgttttattttctttctccccaggtgtgaatcaacttcttgggccttggctctgagttggaaaaggttttagaaaaagtgaagagctggaatgtgggggaaaataaaaagcttttttgcccagtggcgtgtatggtgtttattgggggttggattgaggtggggattttagggtaggcaggcttagaagttttgggggactctttcctgttgactctctagtttggacacaggttggcatagggcataggttacttgagctctccccatggttgacttggctttggtaaacacctgtcttgttttcttctacgaaataaaatggataattacagttagttgggcgggtggggtgtcaggtcatggaaatgctgtgacataaatgcactgtgaccttggcaagtcttgcaacctgcagcgcctcaatttccgtaagagatttgaccgattgagttttcccagcgtcgacgcgcaaagattcctcgcacttggaggcccttttccaggttagatggttgctaacctcggagcagtctattttcccgccttttccgcgcccagcagcagcttcctttgcccctcccaacttccaccctgcgcgcagtcgcagatcgccgctgctgtccgtccacccgcgccccctcaaagcttcccctagcaacaagctcgggctcagagcgaaggcggggcgagcgcatgcgctgcagctctgtccaccgccagtcgtgggacagagtgccgggctcctccccttgcaagtctagctcttctccccgcctcctccggcctggggtccgcgtggcggggcgggcgcgcactcgggcttggcggctgccggtctcccaggccgcggcagtgaggagagagggcggggctgagtcctctgcgcccccgccccctttagcccggcgtccctaccgcgcctgcgcgctcccgcccggtctccatcttggaattgggaggaagagggagagggagaccgggacgagaccggggctgtggtgcggagagaggctgagacggagaagaggagaggcagagagggcgcggggaccgtcagcagcaccttagctacaatcgttcagctattctcggaagagagaagggagagggaggaggccggggcgggagtgggggctgtcaccctcggaccccggcgtgagaggggccgtgcggccggacgtcctcggggtgggcccccagtcggtggccgaagacctacagctcaggcccctgggtcccaaatttccaggctttgcccctcctcctttctcagatacccgggtaacagtcctcatagtccagatatccgggactcgggtcccaacctctctaaacctgggtctctgtttcatagaatttcaaatatcaggttcaggcccctgcgtgcaccagtatccggggttcattccccgggcgttcaaatatcggattcagtctccatcccgttcagatattcggggttcagaccccacaatcagaaatccggaattcggcagctgtcgccctcgacgagggggaggactggaccgcgaggtcagattaggttgtcaccccctcccctccaggggaggcttcccgggcccgcccctcaggaagggcgaaagccgaggaagaggtggcaaggggaaaggtctccttgcccctctccctgcttggcagagccgctggaggaccccaggcggaagcggaggcgctggggcaccatagtgacccctaccaggtgagacacggggtgcaggggcgcgggtccctgtgtctagttctgagaagaaagggtgcgcctttctgagaagctggacttgggtaggccctctcaggatggggaagcccagctgagcgagtggtcagcctctggctagccttgccttctgttgccacccccttccccttcctcttcccttcattgtgtctggttggtgggggacctcaggtgacagggtctctgatgtcaccggcgttcacaccctagggtgcttcagctaatcagatggatttgcacttcagtcttctctccttcactttgcccctcacagccacctctcctccctgatatgtcccgttctcctggctattctgtggttttgattcccatgcctctgattcccatggtgggtctgcttatctgcttttcaggcctggtctggttggatttcttgtccttgcaaggaagtgtgtgtatatgtgtttgtgtgtatgcgtgtgtgtgtgtgcttggaggtgcctggcaatgttttcccccagctgcagttaccttccaacctcttgctgtgatggtgtcaataatctcatccatttgtcaaacgatctgtcttttacaaagtgctttgacagccattctctcatgtgacatccccgcattcaccctgtgggggcctcttttattggcatcttcccattttacagttgagaacgttgaggccgagagaggttgcccaaggtcacacagtggcagaaccagaatttgaactcaagtcctcaatcacatctttccctgatgcatgcctggttcttgccatctcttttcctctgagtttgggctcggccaggggtccctaggagtccaggctggggtgaggtttaagaatggggatgagatgagcttcctttccaggagggctctactcagaagcttttcctgatgggagcctctggcttttgcctctgcctcatggagttttctatccactgtgaccttcatctttaccccaatcccagggtttggcctggattcctgagagggctctctcctgacaaatggtagcactagtggcatcttttaactgttcaagccaagctgttggggtagaatgatcccccaaaggattaaagctttgtggggaccttggaggcagggaaggaaaaatccatatgctgagtgtctgcatggtgttcctaagtatgagatctcattaaaatcttaacaacagctccatgctgtaatccatttcactgaagagaagaccaagaactggaaggaacttatttaaagccctgttgctgtacattgcagacgggatgtactggtagcatagcttaggaacagatagatacgggtttcctcatctgtagaatggagataacattgttcgttttggaaggtggttatgatttagcacagaccttggttattgttcaagtgtttgttgttattatggggaaggggacctgcatgatgttttgccagtgggtggcacccctccgtgtggcctaggttagcattctggggccttgtgttggtaaagaggtcaggaagattcctttggcaagttgagagcacctgcctttgtgtgtgggtgtgtggtgctggtgaggggtgcttggcactgttgctggcagaagggagaaaagggccggctttgagcaacctgcgagctgctgagggctgagcagagagcaatcactcagtctcccaggctattctgagccctctgcaccctgggggcccactggagagtcaggctccctccttgccctccagcttccagttgggctgagacaaaattaacaacacaacaggaaacaatgcatgacagaataaattacatgctaaaattgttaggtgcttttgagtagctagaactctgccccaggagtccagctctgctgaaggctcctttgtgcctaaattctgacaagtgcttaggctggagcctgtcttggaatctccttgagggttttggttctggtatcctgcaggaactttctccgggtgtttggttgggtgccctaggtgctcttcccaatggctggagtggtcaggacaggcttcctgcaagaggggagctgagcttggggtgacagctgagagagtaatggatacaggcctaaccggggagccgaaggtcctgttctctgaccttggagaagtcctttttcttctctgtgcctcagtgacctcacctaggaaatggtgatcatgattctgccctgcctgtttcgaagggctgctctgaaatcatagtgatggaggaccagctttggacaaggcacttaaccttgctgagcctgtttctttatctgtaagataggggaaatcatagtacttgcttcataaggttgtagtgaggactgaatagagataatgcacgtaaggtactcagtaaatgttatttgtaccctgcaaatgtcctgtacctgtgtgtgatgcttatgcagttggacaggacaagtaaggtggcccagagcacagagaggccctcatagccagatgccatttatatccctattcttcccattctagatctccccctgacttttttgagagtgactttgcgggctcctctgggccagtacccacttctaacaatggacggatttccaccgcctccggcctggccatttcctgttctcttccagggtgtgagaggttgagggaggagggggcctcagcgccaaggggaacagaaaggtgcctggaaacagttggggtataggacttatgggacaggacacttggggctctggagtgctggctgggaagcagaatgttttatccttgaggggagatacaggggctatagggaaatgagaacttgttgagcactgaagggggtggtgaggatacttagcttcccagaatcttcctagcagttttagggactccagggacccagcccgcgtgatctggttgccagggcaacttcattttttggagctttgatgttgttcctaatctccccctccccttcctcagcagtgcctcctcctcatcagggaatgaggggaggagatggcagaaacttgatgggtcccttcctctccctgaaggctcaatccttgatctctaagggtcccatttccattcctcaggccaggccccactctcagggcccccaggggccaccatgccagctgggggccgggccgggagcctgaaggacccagatgtggctgagctcttcttcaaggatgacccagaaaagctcttctctgacctccgggaaattggccatggcagctttggagccgtatactttgtgagttgggtcttgggagggtgtaatagggatggggactcttcctatccctgtggacttcccaacagcccttgcacactactccatcacactggtctttcctgccttctcttgctgggccagcaagtcttcccatgcccggctctcaatggggccttcaacaccttctggtctggtcctctaggcccgggatgtccggaatagtgaggtggtggccatcaagaagatgtcctacagtgggaagcagtccaatgaggtgggccaggtgcaatacagccaggttggggacaggggactcctgtctcaagatgcaagctgggtaacctctgcctaccctgaccccctagaaatggcaagacatcatcaaggaggtgcggttcttacagaagctccggcatcccaacaccattcagtaccggggctgttacctgagggagcacacggcttgggtgagctggtgccagattctggcctgatctttactcctattcatgcccgtccttatcgtagtccagtctcttaggtggtccctgttcgtggtgctgttgtgggatcttgggaaggaggaagtctcttttgaccgctttagtcctcagacatacccactgagcaaaagcctggctcagtgacacaggctgttagcaggtgggacaggtcactgtgggctggagaaggtggagattgaatgggagtttgaagggattcagatgggcagtggtgaatgtcttgggcccagactctagaaactctcccaccaccccctcattgtctccagttgcgcttcctccctgtcatcaccccggggacatagcttgagtacaggacagtcaaggaagctctgttttgagtccctgcccaggagactctgatctctgacccttgtctcttccttagctggtaatggagtattgcctgggctcagcttctgaccttctagaaggtaagtgactgataggccaataagtggagaagggagaagagcaggggagccatagggaagggttaaggggagtttattccagtcccacccttgcgctccctcgggttgatgttcttcctcactctccagtgcacaagaaaccccttcaggaggtagagatcgcagctgtgacccacggggcgcttcagggcctggcatatctgcactcccacaacatgatccataggtacaagcagcaccggcagtgcctgggaggggagtgctatctgcaccacctgtcacttagctgggctgcccctgcctagctttcttgagacacatgtctcatccctgtactttgcctctggcagggatgtgaaggctggaaacatcctgctgtcagagccagggttagtgaagctaggggactttggttctgcgtccatcatggcacctgccaactccttcgtgggcaccccatactggtgagtgagtgagtggtggtgagtggagagacctcccagggatgttgggagtaggagtgacagggtctcggcgggtgatttgcctctctctcctgaccattctcctaggatggcacccgaggtgatcctggccatggatgaggggcagtacgatggcaaagtggacgtctggtccttggggataacctgcatcgagctgggtaagaacatcctccctgttccctcatcatcttttccattctttcctgttagttcccagactccggactacccccttctcctagggatgggatcccaggcctccaagttcctgtccgttgtgactctaccctggagcccaatacaggcagctggcaaattctgccagctcttaggcctagagattttgtagcattcatctcttcctgtccactaccctggttctgaatcttttcttagtgcccaccatgtgctgtgccatggactgtgattctggagggatagcagtgaatgaaaatcctgccctcatggaacttacatttgatttagggaaaccaggcaggcatgttttctttcaatgtgatgaacgctgtgtggagaagttacaggagcggttcaaatgtaaaacaggggacttgacctagtttaggggctgaagaaggcctccttgtaggagaatattgaagccaacctgcaagataaataatagctgtttgcagaatgtagggaagagctttccaggcagagagaacagcatgtgagaggcctagaggtaagtgcaggcctggggaactgggactagcttcagttatttggaacctagcatgtaatgcagagaatattgaaggataaggccagagagttaggtccaagtgagttcctaaggccttgaagccatgccaaggttctcatctctgtcagccagcactattgaaacaattctttaatgaggtaggtaacctttataaggcttccaacacaatgccaggcacaaaacagttgcctaagagttgctgttagtttctcttatcaacagcctcctgcagtgatctctccagtctcttctcccttccagtctgtcttaagtactgatgccagagaggtctgcctaagctcagtgctgtcatttcactccctgtttggagccatgagtggccccctgttgccttcaagactgaagccatccccatccttcctcccaccaacctagaggctttgcttcgtaaatgctggccctttccttcatgggctccaccctctgagtgtgtcatgaactcttccacttccttgccttggttcgtattgggtcctctgcccgaggtcagagatttggacgagcccttctcctccatcttcacagtctccatttaccattagatgccaggcccagacagttgatgaaaaatgtaagaaacggacccaagtataagaaaaagctagatctgtccattttatttctagtttttggaagagatgtggatacagagaaatattactctactattgaaaaaaatatatatcagtctgattataaatgtcaactcatactaagtcaatatcagggaagcagtgtggagaaggatgtggcaaactggagattgctgtttccatagaaagagggcagctaatgcttatctccagaccattgttatgcagtaatgtagactccatttcaccagatttaattcttaaggagaaactggaaacttgtattattatttgattattacttttggcagttaattttaaaaatcaccgtttaggccaaaacaacatgacatttgtctgggctacaagggactcttagcgactcttagcttgcacttacctttctaatctcagggctttttacaaagcccttctctgaattccctgaagatatgctagcttgaaggctcactgcatactctcaacttcccagccacttccctgtttccctcttataccagttaatactttgatgttattttttcagtcctatttaatcttttagactggaggttccttgagggtggggcctaattcttgtttttatcttccccatagcaattatcaagttatctgctccctttggcacctaagaaatattagttggggtgataactgaatggctgtccttctgccttcgttactgcttttgtggatgttattttctttgacccctattccacccgtgtgcagtggagaggatgggtgttgtattttacagaggaaggaattaactgagacgcaacaggatgatgggaacttctcaaggtcatgtggcaaggaagtcaaggaattggggtttgaacccaagtcgtctcagttccattccattgtcctctaccccctgccacctctcaccttcttccctttcacctttttctgtagctgaacggaaaccaccgctctttaacatgaatgcgatgagtgccttataccacattgcacagaacgaatcccccgtgctccagtcaggacactggtgaggactgagattccgaatctgggcccaggcgttaggccatggggtatggatgcctgactcatgccttccccacccctctcccaccctcctgtgactttcaggtctgagtacttccggaattttgtcgactcctgtcttcagaaaatccctcaagacagaccaacctcagaggttctcctgaaggtgagggcctgctggcctagcattctcctggaactgtagcttgttacagccacaagaacccccagggaaattagtggttcccagttcctcctccaccaagagcttcgttgatgaattcccaccccatccccaatgcctagtggactctgtgttttacaagattttgtctaccagactgccttaatttattaagtaataaactgttttcccttcttttattaatcaaagatttatataattgccagccagagcttctggtcagcatgtgataaccagggttgccccactgatctgatgtaatgcaagccaaaagcctgtgtagccttatcatgggtaaatgtatgatttcccttaggtgttttttgaattatcaaaaatggaggggccccattcccttcacagacccatgggggcctgaggagccgtagttggaaacttcagattatgtagttggacccacttgttttataattgtaggatactgtatgaagcccagaggggcctcatgacatgtccaaggtcacatagccctttagtagaggagctggacgagaatccagttctcctgactgtccctgcctgtcagccatgcttagaggaagaagagtctgtctggggagtaggtactgggtggtacagaaaattgtgagagaagggcttgggataaggccagcatcaacccgtggtgggcgtgggccccagaagagtgcctcaggcctgagggaatgccaagggctgtgggttgtggggggaaggggagttggcagcagacctcagtgccctcttcccccagcaccgctttgtgctccgggagcggccacccacagtcatcatggacctgatccagaggaccaaggatgccgtgcgggagctggacaacctgcagtaccgcaagatgaagaagatcctgttccaagaggcacccaacggccctggtgccgaggccccagaggaggaagaggtgacccagcttgccctaacacccctctttataccccatgtgtgcctgccccctgcagttgcttggccccttccccagccctactcacaccaccatcttcccatgctacctccatgcatatgccccagggcttccccttccctgtccagcagcctacgccctgttcgcaggaggccgagccctacatgcaccgggccgggactctgaccagcctcgagagtagccactcagtgcccagcatgtccatcagcgcctccagccagagcagctccgtcaacagcctagcagatgcctcagacaacgaggaagaggaggaggaggaggaggaagaggaggaggaggaagaaggccctgaagcccgggagatggccatgatgcaggagggggagcacacagtcacctctcacagctccattatccaccggctgccggtacacagctcacccttgggggacccgagccacctgctctagaactgcctgggtcttcgccctccttccctaagtgcagcactcctctgagtctgattggctgtcctcaggtagctctctttggacccagtggcctctgagccttgggtgttccttctatctccctctagggctctgacaacctatatgatgacccctaccagccagagataacccccagccctctccagccgcctgcagccccagctcccacttccaccacctcttccgcccgccgccgggcctactgccgtaaccgagaccactttgccaccatccgaaccgcctccctggtgagtgtagccatcctcactcagcctgctcgctgtctgttttttaagtctttttaagtctagaaatgatttcctccctgtggcatgggattgagtctggattctaccctcattttctgttgctggctcctgcctgctccccttaaccctcctgcttccctcctcttcccagtggactgttttggtcatatggcccaatctgggtgtttctagcttggcaaactcttactccgtttttgtggcctgacttaactgacatctcctgggttgccttcccaggctcctctggtgagtcagatgcttcacagttgtgtgctggggaagcccagtgctgggggagccctgtgcctgtggagccctgtgctgggggtgtccagtgctggggagccctgtgccgggggtgccctgtgcttgggtggtcctgaacagcatcatgataggtttgccagattctgtgccccagagggcagggatggtgttcagatatctgtctcatgccagcagttagctctcaggcttacacacaggcctgtgttaaccctcccagcccccctgggaggggaagggtaagatcccattggagaaatgaggcacctgtggctcagaggggccacttgccccagtgcctttggtggctctctgctcctgtaagcaggcccttagtcctctcctaaaatcaactcatggcagtctttctcagttcacaggaaaaagtgtttaggcttttcataaaacatagtttttcatctatgtttttagatcacgttcctgctgagctgcatttgagcgtcaacaatccccttagaggccactgattaagtctagtatgttcttatggcctctgcttggtgctggttgtgttccaacaattcttcagatcccatggtgttgtgcggtactgtgctgagaggtcttgactgccaggggcttggctgccgggactagtttgagagccactcatagagtcaattgagaatgagacctgagatcagactttggatgaaggtgtccaagcccagtgttcttgttattccagcatcttgtggccccgatcccacctcaatacctggggagtgataggccgaccatgtttgctgaaggggaaggaagccaacacttattagatagagtccgaacttaccccacagcccctatgaggaggtattatttccccatttaacagatgagggaactggtgctttgagaagttaacttacttgagatcacatgcttggtaagtggcaaagctgggatttgatcccaggtatgtctgactcactgtttcaaattagtatggattgttcctacttttgtgccaggccctgtgctcgccaccttttatcattcggccacaccaacttgtgatgtagataatatcaccattatccagttgaggaaacaggctagagtggccgtgtgtgaggaaggtgttaaatgagaatgaaacccatgagttgaaaacccatgctcttccccacggaagaccccttgtgttaattaactaggggccaggctgagccccagctctcaccctctctccttccccaggtcagccgtcagatccaggagcatgagcaggactctgcgctgcgggagcagctgagcggctataagcggatgcgacgacagcaccagaagcagctgctggccctggagtcacggctgaggggtgaacgggaggagcacagtgcacggctgcagcgggagcttgaggcgcagcgggctggctttggggcagaggcagaaaagctggcccggcggcaccaggccataggtgagaaggaggcacgagctgcccaggccgaggagcggaagttccagcagcacatccttgggcagcagaagaaggagctggctgccctgctggaggcacagaagcggacctacaaacttcgcaaggaacagctgaaggaggtgagctagggctgcttgggggcggagccgatggcgagccaggtgggtcctgaccctgcttccctctgcactcgcccaggagctccaggagaaccccagcactcccaagcgggagaaggccgagtggctgctgcggcagaaggagcagctccagcagtgccaggcggaggaggaagcagggctgctgcggcggcagcgccagtactttgagctgcagtgtcgccagtacaagcgcaagatgttgctggctcggcacagcctggaccaggacctgctgcgggaggtaggcatcccaatctctgttcccctcccgctcactcgtggatcccagggacccacccttttccattttcctcattcttgtcttctttctccttggccctcgagtgttacagttcagctttgcttcagtgccccttttacttctcatccccaacagaccctgccagaatttccttaggcctcttttcccaggccagggaggagcttgcctcccctacaccctcatctcctgccatccccagctccctctgccaaggagccctggcccctcacttccttgatactgaccaggccctgggccctgtgtttcttccgccatccccagctccctctgccaaggagccctggcctctcacttccttgatactgaccaggccccgggccctgcatttcttctgcctcaggacctgaacaagaagcagacccagaaggacttggagtgtgcactgctgcttcggcagcacgaggccacgcgggagctggagctgcggcagctccaggccgtgcagcgcacgcgggctgagctcacccgcctgcagcaccagacggagctgggcaaccagctggagtacaacaagcggcgtgagcaagagttgcggcagaagcatgcggcccaggttcgccagcagcccaagagcctcaaagtacgtgcaggccagcgccccccgggccttccactccccattcctggggctctgggcccacccaacacaggcacccctatagaacagcagccctgctcacctggccaggaggcagtcctggaccaaagaatgcttggcgaggaggaggaagcagttggagagagaaggattctgggaaaggaaggggccactttggagcccaagcagcagaggattctgggggaagaatcaggagcccctagtcccagtccacaaaaacatgggagcctggttgatgaggaagtttggggtctgcctgaggagatagaggagcttagggtgccctcccttgtaccccaggagaggagcattgttggccaggaggaggctgggacatggagcttgtgggggaaggaggatgagagtcttctggatgaggagtttgagcttggctgggtccagggcccagcactgactcccgtccctgaggaggaggaagaagaggaagagggggctccgattgggacccctagggatcctggagatggttgtccttcccccgacatccctcctgaaccccctccaacacacctgaggccctgccctgccagccagctccctggactcctgtcccatggcctcctggccggcctctcctttgcagtggggtcctcctctggcctcctgcccctcctgctgctgctgctgcttccattgctggcagcccagggtgggggtggcctgcaggcagcgctgctggcccttgaggtggggctggtgggtctgggggcctcctacctgctcctttgtacagccctgcacctgccctccagtcttttcctactcctggcccagggtaccgcactgggggccgtcctgggcctgagctggcgccgaggcctcatgggtgttcccctgggccttggagctgcctggctcttagcttggccaggcctagctctacctctggtggctatggcagcggggggcagatgggtgcggcagcagggcccccgggtgcgccggggcatatctcgactctggttgcgggttctgctgcgcctgtcacccatggccttccgggccctgcagggctgtggggctgtgggggaccggggtctgtttgcactgtaccccaaaaccaacaaggatggcttccgcagccgcctgcccgtccctgggccccggcggcgtaatccccgcaccacccaacacccattagctctgttggcaagggtctgggtcctgtgcaagggctggaactggcgtctggcacgggccagccagggtttagcatcccacttgcccccgtgggccatccacacactggccagctggggcctgcttcggggtgaacggcccacccgaatcccccggctactaccacgcagccagcgccagctagggccccctgcctcccgccagccactgccagggactctagccgggcggaggtcacgcacccgccagtcccgggccctgcccccctggaggtagctgactccagcccttccagcccaaatctagagcattgagcactttatctcccacgactcagtgaagtttctccagtccctagtcctctcttttcacccaccttcctcagtttgctcacttaccccaggcccagcccttcggacctctagacaggcagcctcctcagctgtggagtccagcagtcactctgtgttctcctggcgctcctcccctaagttattgctgttcgcccgctgtgtgtgctcatcctcaccctcattgactcaggcctggggccaggggtggtggagggtgggaagagtcatgttttttttctcctctttgattttgtttttctgtctcccttccaacctgtccccttccccccaccaaaaaaagaaaaagacaaacacaaataaaatatctgagcggaactgtgcctttggcccaggctgcctctgtctgctttgtcctgccgcctagcctccccggtatgcccccaggctgaccctcggcccggctccatgacctcttcaccccatctccgttatctcagccccctcactcctccagcctcatgctctctgccttcatagcttcattgcaccatgaccaccaccggctctggggtctgggcccctgtagaacttcaccgaacttcttggtcccacagagcgcctgtttgcgggttccttccagaggtcttagtttccaggcccttggtctcctcatcccttgccttttctcccaaccatggctgcaggggaccaaattgctctcctgcatcaggcattaccctagtgggttgggggacggggctgcagaccctccacagtagggggtgctgagctgggggcaaccaggcggagtatgaaggctgtggcagcaggattgagtgtgggcctggagtgggagctgagtgtgtgaggggccgggctggaatgcggatctggtcagggtggtagctgctggccggttgaacttgtcaggccctttctggccacctcctttgcccctttctcctctgcggcccaaaatggggcagccccttcttacccatttctcagctcggtgcttctcctccttccctgccttcctccctgagctgctggacctgggacttcctgtgtctgtccttagtcgtgttgctttcttcatgggtgttttgtgtgactggttcttctcgcttgttctcgtgcacgttctcatatttgctcacgtgcttctgtctctaggtcacagtctctccctctttgcctggtcagagcttccaagatcctcagttccctgtccagtaactccgatgttctttctcgtgggtatcgcacccaactccgtgcacgtgctcttggaacctcttgtcttctctgcatctcttgcccatcgagaccttcctgatctctctcaacacgatcccacctctccatgtctgtctgtctgtatacagctccccccaccccctctgtctaacatgttttctgtttctctccctctccctgtctctgcttctgtctcctctcctcttctctctcttctccccatttcccctggttgttcctcctcttcctcttcctcctcttcctcctcctcttccccgctgcccccatctccccttgatccgtccactgcatagtctaaggagctgcagatcaagaagcagttccaggagacgtgtaagatccagactcggcagtacaaggctctgcgagcacacttgctggagaccacgcccaaagctcagcacaagagcctccttaagcggctcaaggaagagcagacccgcaagctggcgatcttggcggagcagtatgaccagtccatctcagagatgctcagctcacaggcggtgaggcctggggtccagggagggagtgcgctagaggccaggctctgtactttgctttagagaaatggacggtgcagggcatgcacagagctggggcttttttacttgggaaactcacatactctccctctgttcgtgttctccacaatgatttatttcatattctcctcagtggttttattctttctcttagtattttcttaaggtcttgacaaagccatgtgcctattcccaagaaccaccaaggaaaagagtggctattatttttttcctgggcctgagttagtttaatgggtaaacagggtgcagattaaagtgagtgtggccctcaagcccatttactcagacttctggaggattttgaaagttgctgttctaaaaaaatgatcacacctaacactggaatgggccacttaaaatgtgcggagagggtggagagtggaaacgccccacccaaggctgttctctcacccagtcccacctctcccaggtaacttgttaataattaactgtattttgtgttttttcagtgcacattttgaaaaattatatgaattttaaacacagatggaatcatactttacatttactttctgtaacttcttttttccacttaatatttcttggacatcttcccctgtcagtacacctgtctcattttttttacagcatagaattttccatggtatggctgtaccataatttatttaacccatcccttattggtggacatttaggttgtttccagtattttgctatcacaacgcttccgtgaacacctcgagcacatgtgcaagtatacctgggggatagattctgcagtgtaattgctgtgccacagggtatgaccatcttccattctgatagatgttgagaccgctgcttcttgaaaccttagggcccaggcctacctggggcaggggaggatagtgggggtgggggaggagatccctacaactggttgttcatcttccccagctgcggcttgatgagacccaggaggcagagttccaggcccttcggcagcagcttcaacaggagctggagctgctcaacgcttaccagagcaagatcaagatccgcacagagagccagcacgagagggagctgcgggagctggagcagagggtcgcgctgcggcgggcactgctggagcagcgggtaaggggcccagcctccaggactggggagggagggtgggctcctgcccccgactctaacctctgttccggatgccccaggtggaagaggagctgctggccctgcagacaggacgctccgagcgaatccgcagtctgcttgagcggcaggcccgtgagatcgaggccttcgatgcggaaagcatgaggctgggcttctccagcatggctctggggggcatcccggctgaagctgctgcccagggctatcctgctccaccccctgccccagcctggccctcccgtcccgttccccgttctggggcacactggagccatggccctcctccaccaggcatgccccctccagcctggcgtcagccgtctctgctggctcccccaggccccccaaactggctggggccccccacacaaagtgggacaccccgtggcggagccctgctgctgctaagaaacagcccccagcccctgcggcgggcagcctcggggggcagtggcagtgagaatgtgggcccccctgctgccgcggtgcccgggcccctgagccgcagcaccagtgtcgcttcccacatcctcaatggttcttcccacttctattcctgaggtgcagcggggaggagcagatgagctgggcagggcaggggtgggtggagcctgaccctggagggcactgagctggaggcccctgcaagggtaggggacaagatgtaggctccagctcccctcagacctcctcatctcatgagcttcttggggctggccagtggcccagggccagcttggcgataggtgcctcaaggctgcctgggagccccgcctccctaccatggtgccaggggtctccctccgccacctaggaaaggagggagatgtgcgtgtcaaatattcatctagtcccctgggggaggggaagggtgggtctagacatactatattcagagaactatactaccctcacagtgaggccctcagacctgccacagggcagagcaggtctggggcctgaggcagggagaatgagaggccaccttactggcaggaaggatcaggatggggtcttggggtcaggatgcctgggtctcttcccgtaactgtctgacgtcctgtgccgtcttgtcctttatctttttttttttttttttaattgggatcagggctggggcggggaaacaagggaaggaccttggaaggggctgctcccaggcctggggggcagtcgtgggagcccctctcagctgtggggctggcacagagccccaggcaagcttttaataaactgttggttattctaacagatctcaggactcacccttctgtctttggtgtgcgtgaaggactgctcagtggccactgaatagtactgcttgtgttttataaagagaatttattgggctgtgtatctaaacatttcagtgattttaatgactttaggtgtgaccagatctcggatctcaaaggtggtcttcaaccccttgacctctaattcgttttctttgctttgacttcaaagattcttaggtttgcctcccacacagaccccaggcagctccatgctcacgaatcttcccgcaagcctcagcagccagagttcagtggagacctcatgtgactgcagaggctgggcctgtagccagaggcctagagggctaggactggcccaggaggtatgggcttttccccacccctttgaggctaacagcccatggacaaagtggctgtttgcataagggagaaggcttaagcactggctgccctcaagtcattctatccctctcccaagtgggcattaggttatcagactaggctaaaagcagaggggccacggggtaggcgggcagcacaggagccacacacccttctccaaaagggtctggtggctgttggatgacagggtctggaggcagggacttcttccaggaacccgggggaaattaaagggaaccaggccaggggaggaggtggaggcagtgactactgctcagtttcctggcccaaaatacaggaggtgagaatgggggaccaaatttgatgaggtgattaaaaacactcctttattgagtcttaaaaaataaacaccttaaagggacagcgtgaagctgagaagtagcatcccaacagcttgtgtccttgggagctgcagtcttctctgaaggaagctgcttctgttccacagacacagggcaaggggtgctatgtatgctttgtacatgtatcaagggtccctcctgggggtggcagagctcagttactctcgccatcactgctgatgatgccacgcatatgtgaccagtctgggggtgcgggacggggccgctcttcatctgagtccagggtccgtcggtacagctcccctgggggtgctgcttctcctaaagggttccaggctgtacgtctgcgtggccggcctaggggaaaggggaaacgagagatcagatgtctgagaaggtccaaccccacctatctgctcctgggcagtgagaggaaaccccttacccgagccactgatgatgttcgcaacatccaaggaggccacctcagctgcctcctccctctgctccttcagggcccgacacttccctagggaaggggtacctggggcagaagaagctggtgattctctcctccccagcaggaaggccctctcctgcagcccccagggcacgccgggcctcacccttcatgcctagcgcttccagttctgcccggaggatactcaggcgctccttgtgtgagcaacaggagcccaacagcttcttgtagtttcgatgggcaccacaggcccgaatgtagcgcttcagcctcatcacagccgggtggtcctctccacggcgacctgagccagcctagcaaggaaagagcagctgaaggccaagcctgctgggcctgaggcagggtctccctcttccctaatagtggcctcccacccctcctcaccctcaccttccctcctttggcctctggacttccatctgaggaggaagaggagcttcgtgtcctgcctttcctggagctcttcttggaagagcggttcttcctctccccctgggggcctccccctgcctcgctgtcacttacctccctctccaagtcactttcctcaccactggtgctgcccagtctggccatctttctagagcctttagctgtgggttcccccttcccactgtcttcctcgtcctcgctgcttccactcaacctcttcccacccttaagctgggtcctgtcctcactcttcctctgcactgggggttctctatctctcccactgtcatccccactgctggctgcctctttctgctcttcctcgctgtctgagtctcccaagagcctctttgcctggcttttctgcttacagctcctctcctccctagctgactttctccggccattgctcctggttctgggtttccaatcccccttttcctcatcctcttctttctcttcctcctccacttcctcctctctctgctctttcttctgggctaggatctcctcttcactctcctgttcactttccttcaggcttttagttcctttatttccctccaccttctttgctgtcctctgaacgggttctgcctcgctctcctcactttcttccctggcctgcttcctactgactgaggccttgcctggtgcctgcttctttaccacaggtttcttcctagtcttccccttgtaccccttttcctcctcctcactgctctcctctcccctctgtgcgggcaggtccctctgccgttcctcatcactgctctcctcaactgcctttgaggctcgccttggattctcctctttggctgggctgacttctgctgccaccccattctttgctgggggtccaaagtagtctgggctggaggcttcagagccggactctggaatatggagaggagagagggttgagacaggctcctcctgtcccttctcccttcacttcggataggttgcctcgagccctgccctgacagttggaggggcagcaggaaacagctatctgtacttgctgttcccggttcctgactcactagccttgctccctcatctaacgcctggggacataagagatgcgcagtgaatgcttcttgagtgaaccaacgatgcagaaggcccccacagcagggaggaagcactaacccgactctgaattgaagcggaacctttttctctccgggtcgctacaaggggtgggaggcctcttgcccttcttggtaaggtccagtttgtcttccctggaagcggcttcatccacctgtgtgtgcgccaagagggcaaactatgcaccaaggctgcgctcaccgcgccccgtcaggcccctcctcctcagcagcaagccccgcctccgcctcccgcggcccaggctccggcccggcacacctgcatcttcagcagctcctcctccaccagccgcttcagtgcctgcttctcctcgggctccaggtggctgcggcccgagtgagctaagtacctccgccgcacgatggaatgcgtaagcgtgctgcagggacatggtgtcaggacggagtcccgacccacccgcgccctttccaaccccatctccaaccccctgggcacctgaggtccgggcggcctcggaagaagctacgggtgaactcctgcatctccttctcccgcgccattttgctcaacccgggattgacggctcccgcctttttttcttctcggcctccgtcagcgcgtttgacagcggctcgcgcacgcgcagtgctgcggcaacgtggggcgagggaccgttggcccttggccgcggaccgcgtgggccgagaactttgccagacgagacttgttttctctgggcagttggagggtctcgcggctcctacccttttttggaacggatcattttaaaagttctcgttagaaaccaattcggcgccggcaccctttgggtgaaacctaatcagcccgcgacgctgcctttctcactggtcacgggcaacagctaggctgctgttatttcgcaaggcagaagagaaaaggcatcctcgcgagcagatgaggaacctcggggataaatccttttgtggcttcaagtgtctaagtacattagagtcaggaacggcgctttccagcgtccgccatttttgtggcgtcaccgcgtcgctgctacgccatccccagcgcagtggctgccgcgctcctgtcccagtgtcccccgggaggtcggcccgtgcggtgacgcccctgagcgcggggtacgccgggagttgtagtcctgacggcacagccttgcagcgtctccggaagtggaggcgggagcggcacggcagccactgcttggggtagcgggagggcagactctgggcgccactcccgggccggtcatgaacgggccggcggacggcgaagtggactacaaaaaaaaataccggaatctgaagcggaagctcaagttcctcatctacgtgagtgctgccgcgggaaggctgtgggggatgaggcctggcgcggacaagatctcagtttacccaggtgtaaagtgggtggggcgagcggccgctggttccggggcccttcacggaggaccgttggcccagcgcaccccttgcccgtgatacaggagcacgagtgcttccaggaggagctgaggaaagcgcaaaggaaattactgaaggtgtcccgggacaagaggtgaggcacgttgcaggggcggagggcgatgtgcttcctaggaaatctacattcggaccccatccccgagtagggccacaagtgcatgggctctttcaagtatccgatgggccagctgggagggacaggtacccaggaggacattgctgcgctggaaaatcactgtccgtgtctccttccctcccctcagtttcctcctagaccgacttctgcagtacgagaacgtggatgaagactcttcgggtgagcaaggtcttcaaaaattggtggagagcatggttcctggtacttagcaagcttcctgggcccccgccttttaggcagtggtggctgatgcagcccccagtggtccttaagcctagttgcttgccttccacctccaccgttctttcattcaggcacttactgagcacctattgtgtttcaggcactgtgcttggcacaggggatacagcagaggcagagataggcaaagcccttggcctcttgtaatttatattctagttgggaagaataagtaaatgaagacaatagactagaattttaggtcataggaaggacttgaaggtaatgaaaacagttatgcggtaatgattatagtagaacaggggttgatgaattgtttctgcaaagggccagatggtaagtaagctttttgcaacatacaatctttgaagcacctactgaactctgccattgtagtagcagccgtaccccataggcaaatacatgagtatggctatgtttctataaaactttataggcactgaaatttgaatttcatatttttccatatgaaaaatttttctttagttttttttttttccaaccgtttaaaagcttaaaagccattcttggccaggtgcagtggcccacgcctgtaatcccaacactttgggaggccgaggtgggcggatcacaaggtcgggagttcaagaccagcctgaccaacatggtgaaacctcgtctctactaaagatacaaaaattagtcgggtgtggtggcgtgcacctgtaatcccagctactggggaggctgaggcaggagaatcatttgaaccctggaggcagaggttgcagtgagccgagatcgctgccactgcattccagcctgggtgacagggcgagactccgtctcaaaaaaaaaaaaaaacgcccttcttagcttgcagaccacacaagcaggcagcaggcaacctctgaatggagtactcaagaaaggcctttcacagagtgacatttgagttgggaccagagaagaaaccagccttccatcctgggcaacatagtgagaccccatctcaattaaaaaaaaattagccatgtatagtggtgtatacatgtggtcccagctacttgggaggcagaaccaggaggatcccttgcctgaaaggtcaaggctgcagtgagccatgatagcaccgctgtgctccagcctgggtgacagagcaagactgtctcaaaagaaagaaaccccatcctggctaacacagtgaaaccctgtctctactaaaaatacaaaaagttagccggggatgttggtgggcacctgtagtcccagttactcgggaggctgaggcagaagaatggcgtgaacctgggaggtggagcttgcagtgagctgagattgcactactgcagtccagcctgggcaacagagccagactccatctcaaaaaaaaaaaaaaaacaaaaaccaatcttgtgaagaagtgggctagagctgtcccggcagaataatataaatgcagctaccctgaggtaagaacaggtcaggcttggttgaagagcagaggcatgaaagagagagaacactgttttcgtccttttatttgaatattgtctgcagttaactatattttacatcataaccagggccccacatgttaaacaaaacaaagtttaacgaaacatttttaagatcactgtatccaattcatcctgacactttttagactgcttttttccccttcttttaatgctggttgcaaaccaataaattgatttcatgacccactaatggcttgagacccacagtttgaaaaagccctaaggtaggcatttgtgggcctcttcctgggtgaggccctcgtaagccatgtcacgtagaatcacctctctccgtggtgcctttaaacattggtctgggccgggcacggtggctcacgcttgtaatcccagcactttgggaggccgaggcaggcagatcacgaggtcaggagatcgagaccgtcctggctaacatggtgaaaccccgtctctactaaaaatacataaaattagctgggtgtggtggcgggcgcctgtagtcccagctactcaggaggctgaggcagaagaatggtgtgaacccgggaggcggagcttgcagtgagccgagattacgccactgcactccagcctgggcaacagagcaagactccgtctcaaaaaaaaaaaaaagcacattggtctgaggcagggattggcatgtggcagccagccacgttttaggacgtagtgttttgtcagaacgcatgatacccatttgcttgttattataggaggattgtagataaggttggggaaataggcaggggcccactcaggtaggtcatagtaggagatttggcttttattgtagcctctcatcccctgcctcttccttccctaggggcttccagttaacatcctgtttgaggggaattcagggcaggaggtgggagagaacccagcatgttcatggccagagtgggttgcatctgaggaggaagagccagcgatgcgagccccactcccgtcctggaggcccacgccctggccagggagacactcgcaaacgacgcttttcagcacagtgtgagggcagccatgacgagagtagagcgttccaggagagcctgcagttaactgggcttgagggattctggaagacttcacagaggaggtggcatttaatctgcttcttaaagggtctgtctgagcagagacattggtaacggcttctataggtgtagcagtcgtttgttcgatgaaagatggcccttctaggcagaggcactgaactaggaaatacatttcttttttgacgaaataggtcagtgtgctttaaagaatacagttacgttagttgaccagaaaggtacattgaagccagattaagcagcaccatgaattcatgcaggtagtgggtgatgtcatcaggaaggatgtgaccaggtttgttttaggtcactctggggttgggggtggacagtgggtggcacggtgaggtgagactgcttagcaggtgattttgacgtgctggtggcctgacctgtgttagttggtgtggggagcagtggatgaaggggaggacttcaggggtagatgaacaggaccctggttatggggagtggggcagaggcaggagttgaagactgctcagctcagaggcaaggaaccagtggcatcaaacagccaaggagtcacagacctggcttggagtcttagcctcacaccttactttctgagcctcggtgacctcatgtgacaagtggaggtgctgcccttcccatccttccttggatctgatgacaaggagaggtggtgagtgggaaagagcctggcaccctggccatgcgtggcaggtgtgttacggaggaaccagagcgggcggggggctggggaggctggagaggctatgggcctccctgggacagctcgagtgtgtggtgcatgcgtgtgcccaccagctggtgagtcagattcccccggggcccttctgttaggttttggtttgtttcatttttttgaggcagggtcttgctctgtcacccaggctggcgtgcagtgttaaaatcacagctcactgcagtctcaatctccgagtagttctcctgcctcagcctcctgagtagctgggactacaagcacacgccaccatgctcggataattgtttttgtttttaatagagatgaggtcttgctaggttgtccaggctgctcttgaactcctggcctcaagcgatctggccacctcagcctctcacagtgctgggattccaggcgtgagcccccgcacctggtcttccagtgcccttctgtagtgtagaggaggttatacctttctgggatggactgggatccccccatccccactgaccagctgtccccatcacagactcagatgccactgcatcatcagataacagcgagacggaggggacacccaagttgtctgacacaccggcccctaagaggtgagaagaagatgcattcctctcgctggggagggtcaggtggggcgcctgggctcctagccacatctgacctcgccctgtcctttctccaggaagagaagccctccgctggggggcgccccctctccctccagcctctccctgcctccttcaacagggtttccccttcaggcctccggggtcccctccccatacctgagctcggtgagttggggtcagggatgggaagtgcttgggagtaaggtgggcgtcatttgggcagaagggctgggcctcggggcaaggccagcccaactttggggacatctgtctgggtgtggcccaagtgtcccgtggagggtgtgagtcggggctgcccccttctctctggtataggaacggggccaggcctgactgaggagagcaaagcccaggacagcatcctgctgctgcccggcccttctgtgctcgggagccccgggagccgcactcatcaccatctcttttgtttttccatcctccttctgtttgcatttcttcccccaccctcaccccggtccattccgcctcccatctccatccccgctcccgcccgcagctggcctcctcccgctaccccccattcccttctgactacctggccctgcagctgcccgagcccagtcccctgaggcccaagcgggagaaacggccccgcctgccccggaaactcaaggtaccctgacgtgggggtgctagggaggggcaggacggcaggaggacagtcacctgagggaggctgaaggcgggggcctgtcagagaaccatgaacagttaatttggggacccagtcagcacttagcactgaggggtggatcacagaagtctcggcttacaggcttgtatggagacaaatcagggcagaaccagccttggaggacccggtgtgcagatgccagggatcccgccctttcatggctgcagtgtagcggggccaggctcattttcccaggggggcgtgttgtgtgatgccaggtagccccagaccgggtcaggattatgggatctagagtcaagtcaagactgcctgttagaaaccacgtggccttgagcaggtctctgctaccctctaggcctcctaggcttggcacctatagggcgagtggtcctactcgatgtgaccagcaagcgcccctggagcgcctcctgttacacggcagtgcacaaagcagaccagtgcctgccctcacagagctcacagtctagcaagataggcagaaaacacaccagaaaagtaggtacttgtggagaagaacagagcgaggtccagagcatggggacgccagggggacgaggctgacacttagggcccagcagtctgggatgttcttgatcagagacttacaggaaatggcagcaagctgtgtggctcctgggcagtgtttctgtcgggcagagtctgtgtttgggagaaaagtaagcagggaattgggtcccggagcaggtcagagggggagctcatgaggtgccagtgtgcaggattcgctgtgaatgaagccttggagacagcagttccctggcggggcgcaggttgcaggtgtggagggggagtgatctaattgcatcttaacaaaattgcagacactggtggtcagagaacagactgagcggtggagtgagttgggacgggagtgaggaggccaccacggtaaaccaggccaagggcagagggtccagagggagctgcggacccatttcagagaatgagcatgggagttcctggaggacctggtgtgggctgtgcgggagagaggccaggatgcctccagggctttagtctgagcacgagtggagtctccctccctggagatgggagggctgtgggaccacaggcttggaggaaaactgagtctggccgcggatgtgtcagatgccatctggaaaggcagctagatagcggcccgtgaggggctgcgcatttggaagccgccaggctggcggtagatgcaagccttgggagagatggggatgggctgaggggcagagcggagtggggaccaactgggcggctcccagggttctggagccagaagcagaatgagaggccgcatttgcggtggtctggagtacaggatctggagctctaatcccaactctgccgttttctccgtgtgaccttggccctgtgaggcttcacctcttgagcctgagaagcagaggtgacagtactggccctggttcttagcaggggggtggcgggcagggtagggggtggcgcagcactggggggcactttgaggctttctggctgggtgctgagtcctgaagcagagtcatgtccgggagcaaagttgtagacattctggagagaaggtttgagagggtggcccaggtccatggctgtcgggggaggtggggagaagccaggaaaggcctcagcaaggagaacgtgtaagcccagggtgagtggatttggatattcctggctgaagccatagtgggaagggagacagggccacagggaaagcactgcctgggccagagcaggagtggtaagaaattggcaagaagaaccgggtggggtggggtcatggaaggcctggacagtggcctgaagtgggaatttgtctgttactgtcaggggagcgggagtccctgaagggccaggggagtgaggagatggaaggaagggagtccaagcagaggaaggatagctgtgaagacagaagcaggttggttctgtcaggcctgagttggacttggccagctttgaatcccagctcttccagtgctcaccatgcgacctcagcgttgtcatttcactctttaagccacagctctctttctccattcagtggcggcattgtgcggagaatgtgagtgaagggatgaaaatcgctcggcccgtgcctggcccctagtaagccacagagaaatgtgagccgctgccagtcaggctgagaggacgccactgaggaagtccaggccagggtgggacatgctgcgcacagtggggaaggagaggaggtggccagaggaggggatggtcctttccagtcatacacgcatgtctgcttgtgtgtgtacatgtgggggcctggtgcagggcgtgggggtgctgttcagagttggaccccccatcatccatcctgccagcctcctataccctgaggcctgacccaccctggcccccacaccaccccagcagcggagatgagggtaagtgagggctccttaggaagcagagaggaggccacagggccaaatgtgacactcagaagggccactggagaccacgcatggcgtttcctgccagcccactcagcatctagcccagggccagactggacactgccccgcaggacccagcaggcctaagcctcaggacctccatgtccacaccaggttcagcctcctctgctggcacgtgacttctccccgtttcccgccccccagtgtcctgaggctgggagggcattaacagaaaccacctgacacacagcaggtgcccagtttgtgcccacagacaaagcacggggactgcagaggagacccacagagctctctagggagggtttgtgaggacctggcagcgggggggagctgaagggttgagcagggcagaggccacttcccaccctcagaggacaaagcaggacttctgacaaatagagcaggatgcccagggggaggggctgcctgtcgtcccgcaggcggcactcccgccccgaggccccgagtggcacggtgacgcgctcaggtctgtgttttagagcgcgcgctctggctgccgtgcggaggagctggatctgggagaggctgcgggcagggagtccagttaggaggctgggaccgcagcccaggtgagctaagaggagggctgggcctaggccacagctgccgggaccccgaggaggggcccatccaagacataatacaagcttcttgggggcagataagccgctggggctcctggctcaggcagcctgcaataccctccaccgaaccagtgagtgccgcagaagagggagaggaggagtagggagaggaagctggtggcaggtggcacctccggggccggcaggcaggcaagcactccaggccgactccgcctctggcttaacccctgtctcagggcagcccaggcgcctccctggagagggcaggtgcccgggcctttccctcccggtttcctgtgagacacccccatcccctcatctcacctctatcaccacccccaggcacttgctggtttgaggctctcgaggggctgaggggggcaggccctgagtgcagcatgggttggcccagctgtgcccagggcctcttccccctccccagagctgccctggggggcaaagcctagtctcctgaggccccagtgcctccctgactagtccccctgtgtttcttccccctgctgcagatggcggtgggaccccccgactgccctgtgggagggccgctgaccttccctggccggggttctggggctggggtcgggacaaccctgacccccctcccaccccctaagatgcccccccccacgatcctgagcacggtccctcggcagatgttcagcgatgcaggtagcggggacgatgccttggatggagacgatgacctggtgatcgacatcccggagtgaccgtgacatcacgccatgcccaccacggccccgcccggcgccctccccgtgccagcacacacgagtccagcttcctcggaggtgtttattgatgcccagctgccatgctccggccactgacacaaccagaaaaggcgtaaacatgcacgggtgtcccccaggagggtggcaggggccctgccttcaaaccccggccccctccaggggacagttatttaaacgagtggccgggagcatctgccacctgctggggaggcagagaccctgcaatggccacctctttaaaagggcagctgtacagggctaggttttttcaatgaagtttctgtattaaaggagtggctctgggtttgttttttgtcctttttttttgagacattctcctcctctgaacctcccctaatccgacctcctccctgttgggggagagggacggggcagcgtggagaggcaggagtgaggagcgcgggggcctggggccgggctctgagcactgcccgggtgtgcagatgatggggggtttgcatatttgcagggactagcgagtcaggcaggaggtttgcatatgtgaatatagaactccgcagcccctcatgagcagacagacccgggtcacggagactcacaaaaataggtagtgcagggtgggggcagcccaccctgtgtaaacgtgcaacacactcgtgcgaaggttgggtactggacccggctcgatgggcctgtgccgggacactgctgtccactcaggctgaggacagagccccggccgcagggggcagctcactggtcagggtgtgccagcgctccagggctgcgtccggctgctgcaggcagtcactccagtgcttccgagcctcgcctcgggcacctggccccagggacacgccacctggggagcaggtgggcagggtcagggccacctccctgccacttgcccgccctcaacacccgcagccagctcctccctcaccaatgaagtcattggatttgccaatgtcatagtcccagacggtgacttccagggtcttggtggccagagtggagagctctatctcgtagaaaaactcctagggacaaggccggccacccgttcgtgagccagctccccagcccctccctggcctccctccatgtcccgtcccctcctgggtacctcgttaaattctgggttgagagtcttcttcttcacacacgtcttatgcttggatttcttgtccacatcgggcctcaggtacctgggggtggggtggagggagacgaactgaggggtgagggacaggccaggcccaactcaggccagggcaggctccctggggaggagagggtcagagcaagggctcacgtcttgacgtaggggtccgagtaaccgttgacgtccatggcagccagatgggcgcagcgcaagatgcctaccagcagtccccggcgccgcgagctgtagctgagactcagcaggatgcggccacgctcctccagcagcccctgcccctgctccgcctgctccaactgcggggcacagactcagggtcagcctgggcccctgcagcctcccacccacatgcatccccatccccatgaggtgcctcacctccttcagataacaggagatgcccctcagcgccgctgacatggaagagggggacgccagctgagggggcaaagagaaggttctggaagcctggcctccccagggccccctcccctggcgcccctgcagcccccacacagaccgggacctggcgctcgaggcagatgttaaaatgcttcttctgcgaaggcttgaggcggcggaggggcacgcggatctccccaataaactcattgtgactcagcttgtcctcatcacagacggcgatcctggtcgggaactgcagtgtcagggcccctggggtacctgagccccgttccggggtgtaggaagggccttggaccagcccagctctgccctaaacactacgtctcatctggaagacaggctggcacttgagaaggacaagcagatttgcccattcctctgtccctccctctgcagccacccggctgtccctggtccatcaggacatgctcagccattgtgggaagccctcagaaatcttggagcacgctgctcactgcctccattcagggcctgggggcaggagccgaacaccacggtggatgtggccatagacacaggccgtgagagctagaagggccttggagccttgggcagccagaccagtaccccacgcctcctcgggaacccccgtccttttcctgcatgcagcagagagccagccccgcagggactcactaagaaatgattgctttccagccacctgtcctcctgcagtccctgccctgcctccgcagtgacccactaccaggctgggcatctgtggcatggaggatgggcagatcccagccctgccacttctgagccacctgtgtgaccttgggcaagtcacttgatcaccctatgcctcaattcccatctgtaaatggagatagtcaagggaaagaaagaaatgtgaaaatgctaagcctgggctgggccctggtgagcgctcattttttggtctcattctggttttggcctctggcctcccctccattccacccgaatagctgaaaccaaggtggcctctctgctgcacagccctgaccatcagggaaggtcccagctgcaaatccaagcacaaaggcagaggtctctccagagcctgggtttcgctgcccgccacctgacttgagggagtactctccctacatctccatctcctaggatgacggagcaagttccctgtccctgaagacttcactccttaagagattttaggggaactcaaggcacggaaggggcagaccaaagctgcagaggtctggcttaagccaagggctctgagaaggggtctcggcaacccaggaacgtttttgggagggggcagagcttggactgaacctcagatgagcggaatttaggctggcaggaaggagctttccagatagaaaacaacaggaaaagttcaggagttgtggaactggccagttggaagaagggagtcctctgtttgaggggcagaagatacttttgttttgtttttgagatggagtctccatcacccaggctggagtgcagtggtgcgatctcggctcactgcaacctctgcctcccgggttcaagtgatcctcctgcctcagcctctcgagtagctgggatttacaggtacatgccaccacgcccggctaatttttgtatttttagtagagacgggggtttcaccaagttggccaggctggtcttgaactcctgacctcaagtgatccgcccacctcggcctcccaaagtgctgggattacaggtgtgagccaccacacctggcaggcaggagatattgaggggcaggaatggcagggaagaattttggcctgctgccaaaggggctagggagccgctgatggttcttgagcatcagagaggtacgggcttaatgggacatagatcaaccaaccagcggttacaatgtcagctgtccccgagctgctgctgggtggtggggaggggggccctcacctgagcaccttgtgcgtgatgtcgtcatctgtgatcccgctgtaagtcaggtcctcattccacacgggattcagtgtgttcctctgagtcttcgtttttagcttattggcctgggatgtggggatgaaaggttctcaatacctgtcctccagccccacaggctggagtcatgggctgggccgggcggggcgagaggaggctgttaccttacaggctccaggcagcaagtgcagcttgacgtaggggtcggcgaggccattgaaatccatgggcttgaggccctggagaggagggcaggggagagggctagaggctcccggcacctctctccatccctcttgtagagctggaccctggaggagcccagaaggagggggcaagggcaggacgaaggagcaggcctgggaagggaaggaggaatgggccccctctgggggctgcacgcaaaccgggcccgggcttgggtggcagggagtgcccaccttggccctgaggatgctacagtgcagagtgcaggaggcccggtcgtagagaaggtcaaactccagcgtgcctagggcggctggagagagaggaaaggcagcatgggtcggtatggagacaggtgtgtgcgagaggccagcaggtgggcactggctctgtgtgtctctctctcttgccagcccgcgagtgtgagtgcaagaggctgagtgggcccatgcgtgtgtgcgtctgggtccctggctcggccgcaactggggctgtgtgggtggtggagtgtctcagcagaaatactgaatattgagccttgctgaagctgtaatctccacgctgactgcagctgtggtggccgtccctgccacccccccactgccctcctcccctacctacatgcacagccagcagggcccatccccctctccccccaccacggcaagcctggagacccccaccagcacatggggcctccaagcccccagactcactggcatcatccgagtcatagctgtccacctccgcaccatcctcaggcgtggtggccccaaggagggctgcagggggggccagagccagggggaccagatgggcgggggcctccccgccgcccccgccgcccccttcaggtcctggtccccgggggaagtagtcagagatctggcggatgggccggatgggcccggggcacacgttgatggccatgtgctcctggatgttgatggtcatgcgatcgcccctgcggcccctcatgcagcacccctggctaggagagggcgtgtgagccagtgagcccatcatacctagccatcctggctgagggccaggcgacggcctcctcggtctgtggggccctcactggcctcccttcctaggtgtcgagggagagggtggtgtgtgccagccggtggcaggtgggaggcctgggccctgcagaccccaagctgactccacaggggctgggctgccaacccactccttgcagaagtcgaggttgcaccaccccgtcctcacccacccacttctaggttgtccctgtatcatcttgccagctccttcctctcctccggggctcccctctgctcctgagcctgcctgtcccccaaggggccctgcagggccccgcctctgtttctcggaggctctgtcctcctctgcaccaggcgctggtctagtcagggtgtcacccacccctctaggctccaactgcccactgtcccctcattcagccccaggacctgtctgcctgcctggttcccccgctcgctcaccacagcccacggtggagaccccagcctcagatgccacctctggctcctcaggggagccagaaattgcagccgcaggagagccgaacacccccgtagcgcacacaggctggcacgcttccccgcaccctcacgcccccggcctgcccagccccctgcacctgcctctgcctccaacaggtgcccaggcactggggggacggcgggcgcaggctgggcggcggcggccggcgaggagagcgcggagtcgagctgtgcgagccgagagggagggagcgccgagaaagtgcggggaggagggggtgagcgaggtggaggcgaggatgcagccggcgcggcggcgggggacggggaggggcgctggggctggggagggggcgggatctcggactcccacccggggcccgctcgggagcgcacgcgagcgcgcacacacacgtgtgctcgcgcgcgcacactcacgcaggggcacgcggaccggcacacactcgtgtgcacacatccaaccgggcacccccgcgcgcacacgcccgtgcccacgtgtgcacgctcacacccttgcacacacccaggcgcgcgctggcacacttacccggagaacttcgcacacacacgcactcgcaaacacgcgggctccctgcgccaccaggaagcagccgccagaatcgccgggtgttccccaactactcctgggagacctggccccccgcccccgcccgcgcgcgcggccacggcgcctccctccctcccgggtccccaaggccggaccaccggcctcgttgtcatggcgacgccggctcatctccccccacccccgcgcgtcttcacgcccctcccccgcagggagctggggcctccctcctcccttccccacgtccgtagggacccacaggttgacaggagcagggggtcgcctgctgtcaccggccggggatctcggggtctcccgagccaggctggggagcctcacgatctgagggaggaggcagaggtctgatgctgcggcttcccccacgccccctccctttggccgttcaggcctctctccttgtggcccaacccaactcccaggggcccatgtccccttaccagggatggtatctcctttgggaaccaccctcccccctgccatccccagttctgccccgcaggtgggaaggggcgtcggggcttggctctgaaggtctcagagccctgcggtagttccccatgggctgccatttctcacccaaaccttgccacccccaagccgcccccctgcccggccctgcgcctgccacggagtgtcagtccacccctggccttcggtcttcactcacctgtgccccaaacttaccatcccgaagacacgaaggggcttatcaccctcgctgcccaccactgactcacccaaccgtttcctgcagttcctgggacacacctagacggctcaggcctagggatcttggctcacatgcgctcctctacctgggaaccgcgcttccttaggaagtcaccgtgggtcccctcttcctaggagccttcctggggcatcccgcactgcccctcagctccagcgccgtcaggactcggctcagcaccgcttcgccagtgcctcccccaccagcagggagttccactggagcggctgattcatctgggagtccctaatgtcccaaactgggcctggcacgaagtcggcatctctaagtgctgttatttaaaacagcaatctggttgcacgacaactgaacatacctaacaccacctaatcttacccttaaaaatggtgaagatggtacatttcgatatgcgtatttcacggcaatttttttttttttaaataagagaaatggggccgagagtggtggcgggtgcctgtaatcctagctactccagggactgcggcgagaggatcgcttgagtgaagccagcctgggcaacacagtgagacacagtctcttaaaaaaaaaaaaaaaaaaaagtaagagaaatgtaaagtcaacaacactgagggggcggggcgcagtggctcacgcctgtaatcccagcgctttgggaggccgaggtgggtggatcacctgaggtcaggagtttgagactagcctggccaacatggtgaaaccccatctctgctaaaaatgccgggcgtggtggtatgtgtcttgggaggctgaggcaggaggatcgcttgaacccgggaggcggaggttgcagtgagctgagatcgtgccactgcactccagcctgggctgtaagagcaaaactcagtctcaaaacaaacaaacaaacaaacaaacaaaaaaccctgagatatcacttattacccataaaatgggcaaagccaaagtgtctgggctggggggaagctgagacggactgatcccttgagctcagaagttcaagaccagcctgggcaacatggtgaggccctgtctctacaaaaaaaaaaaaaaaaaaaaaaaaaaaatccaggcatagtggtgtgtgcctgtggtcccagctactcaagaggctgaggtgggaggatctctcttctttttttttcttttcttttttttttttttgagatggagtctcgctctgtcgcccaggctggagtgcagtggcgtgatctcggctcactgcaagctccacctcccaggttcatgccattctcctgcctcagcctcccgggtagctgggactacaggtgcccgcctccacgcctgactaatttttttgtatttttaatagagatggggtttcaccttcttagccaagatggtctcgatctcctgacctcgtgatggtgggaggatctcttgagcccagaaggtcaaggctgcagtaagctataatcactccactgcactccagcctgggtaacagagtgagaccctgtctcaaaaaaaaaaaaaaaaaaaaaaaatccttagacccagaaattccacttttaggattttatcttacagatatgccaacccataagccaaataatagaagttcaaattctttttttctttttttttttttgagacagactttcactcttgttgcccaggctggagtgcaatggtgcgatcttggctcaccgcaacctctgcctcctgggttcaagcaattctcctgcctcagcctcccaagtagctgggattacaggggcgcacgccccacacttggctaagtttttgtatttttagtagagacggtgtttcaccatcttagccccgctggtcttgaactcctgacctcatgatccgcctgcttcggtctcccaaagtgctgggattacagctgtgagccaccgcgcctggccatgaagttcaaaattcttaaatgtagcacgttccaaaagactggaaacaactgagatacccagaagcaggggaccagttaaatcagtcatgatgtaattccatgcagtgaaatagggtgcagccacaagaggctgttttgctcttgtttagaatcatctttttttttttttttaaatatacaaggtctcactactttgcccaagctggtctcaaattcctggactcaagcaatcctcccgcttcggcctcccaaagtcctgggattacaggcgtgcgccactgtgcctggccctagaatcatttcacagtttcattttaacttagaaaagccaagtgcaggccaggcgccatggctcacgcctgtaatcccagcattttgggaggccaaggcgggtggatcacgaggtcaggagatcgagaccatcttgtctaacacggtgaaaccccatctctactaaaaatacaaaaaattagctgggcgtggaggcgggcaactgtagtcccagctgcttgggaggctgaggcaggagaatggcatgaacccaggaggtagagcttgcagtgagccgagattgcgccactgcactccagcctgggcgacagaacgagactccatctcaaagaaaaaaaaagcaaagtgcaggctgggcatggtggcttacacctgtaatccccgcaatttgggaggccgaggcgggaggatcacgaggtcaggagttcaagatcagcctagccaacatgctgaaacgctgtctctattaaaattacaaaaattagctgggcatgttggcgggcacctgtaatcttgggaggctgaggcaggagaattgcttgaacctgggaggcggaggttgcagtgagccgagatcatgccactgcactccagcctgggcaacagaacaagactccatctcagaagaaaaagaaaaaagaaaaaaaaatcaaaaaagaaaagcaagtgcagagaagcatgcttggaatactgccatttgagagggaaagagcttagccgtgtttgcttagttgttcatatgttgtttctggaggcctgcacaagaatggtaactgtgtctcttgacaagctgagagagtgaaaaaataaaaataataataaaaaaataataaatacacagaagaaaatataactatggtgacctctggggagacagggcaggaagaggaaagacttacttttcaacgtacatccttttgtattttttgaattttgtgccacatgcataggttacctgttccaaagaatacattaaaataataaattttggtatttctttgtttgtttgtttgtttgtttgtttttgagatggagtctcgctctgtcacccaggctagagtgcaattgctcgatcgcggctcaccgcaacctccgcctctcgggttcaagtgattctcccgcgtcacactcctgagtagctgggattacaggcacccgccatcatgctcggctaatttttttgtatttttgtagagatgggttttcaccatgttggccaggctgatcttgaactcctgacctcaggtgatccgcctgcctcggcctcccaaagtgctgagattacaggcatgagccactgtgcctggccaaattttggtcttgtctttttctttcttttcttctttccttccttccttccttcctttcttccttccttctttccttcctttttctttttttttttttttttgagacagggtctcactgtgttgcctaggctggagtgcagtggcaagatcatagctcacgacatcctcgaactcttgggctcaggcgatcctcccactttagcctcccatgtagctgggactataggtatgcaccaccatgcctggctaatctgtttttgtttgtttgtttgttttgtagagatgggtcttactatggtgcccaggctggtttcaaactcctggcctcaagccatcctcctaccttggcctcccaaagtgctgggattacaggtgtgagccaaagaccatgcccagcacaataatatatatatatatatatatatatatatatatatatttttttttttttttttttttttagacagagtctcgctctgttgcccaggctggaatgcagtggcacgatcttggctcactgcaacctccacctcccaggttcaagcctcagcctcccaagtagctgggattacaggtgcacaccaccatgcctggctaattgttgtatttttagtggagatagggtttcaccatgttggccaggctggtctcgaactcctgacctcaagtgatctgcctgccttggcctcccaaagtgctgggattacaggcatgagccactgcacccggccaatatttctaaagtaaaggcaaccgttaggtttccttcgtggctctccagaataagaaaggaagcaggacgaagggagacacagtgcagtgtgaaagccggtgagtttagcaagagggtgtccatgacctgggcgcagggggcctgcagtgaggggagggggacactctggtcaaggaacctgtcgagtcctctctcctgtgctctcttcccacggtgcttgctcaaccccagccctgcctgcctccagaagaacttgttgaagacaggtaaggatgaggctggagttcaagccaatttcagaggaaaatgatggacagtgctgagccctgctttgtccagagacgggaggcttttgcaccagtcacccagtcattcagtaaatattgactgaatatcgactatagattgtggggatacaaccaggcccaaggtcaatgagctgtgacttcacagcctcatagggaagacagacaaatacacagacaatccccatccagggaaactgacgtggggacaggggatggtcagaagccatgggaactcagggtcctatgaggtaggagggaacaaagattaacacctcacttcccagaaaaggagttgtctcaactgagacctgaaagatgaggaggagttacccaggtcaagcttgggggcaagtgtattctaggcagaggtgtgtgccaaagctgggaggcagtccagagtacggcatattcagaaaagaaatcattctaccagcctggtcaacatgacgaaaccctgtctaaaaaaaaaaattagccaggagtggtggtgtgcacttgtagtcccagctactcgggaggctgaggcaggatgatcgcttgagcccaggagtttgaggctgcagtgagccaagatcaagccactgtactccagcctgagtgacagagtgagaccctgtctcaaaaaaaaaaaaaaagagaaaaagaaagaaagaaatcattccaccaaaaagacacctgcacttgtgtgtttattgcagcactgttcacaataggaaagacacagaatcaatctaggtgcccaccaacagtggactggataaagaaaatgtgatatgtatatgccatggaatactatgcagccataaaaaagaatgaaattatatcccttgcagcaacatggatgcagctggaggccattatcctaactgaattaatgcggaaacagaaaatcaaataccacatgttctcgtaagtgggagctaaacattgggtacctatggacataaagatgagaataacagacactggggactccaaaaaaggggagggagggaaagagtcgaaaaactacctattgccgggtgcggtggctcatgcctgtaatcccagcactttgggaggccaaggtgggcggattgcttgaggccaggagtttgagaccagcctggccaacatggcgaaaccccatctctactaaaaatacaaaaataattaagtgggcttggtggcatgcgtctgtaatcccagctactcaggaggctgaggcacaagaatcacttgaacctgggaggtggaggttgcaatgagctgagatcgtgccactgcactccagcctgggcaacagagtgggactctgtctccggaaaaaaaaaaaaaaaagaaagaaaagaaaattgaggctgggcgctgtaatcccagcactttgggaggccaaggcaggaggatcccttgagccccggagttcaagaccagcctgggcaacatagtgaaatcctatttctaccaaaaaaaaaaaaaaaaaaaaaaaaaacttagctgggcatgatgacttgatgatgcagtcccagctacttgggaggctgaggagagaggattgcttgagcctgggaggtcgatgctgcagtgagctatgattgcaccactgcactccagcctgggcaacagagtgagatgctgtctcaaaaaaaaaaaaaaagaaagaaagaaaattgaaccaacagatctttttattcttatcttttacagatgggattctctgtcacccagcttggagtgtagcagcacgatcatggctcacttcaaccttgaactcctggcctccagtgatcctcccacctcggcttcccaaatttctcggattacaggcatgagcccccgaacctggcctaacaggtctcaatttggggttcattaggtgagagataaggaagcaggatgattcctaggtttctgtgttgagcagaccatctagaggaatgatgggaccatccactgagacgaaaagatgggagcagagcaggtctggagtaggactccatttgtgatccattgccttggagatgtatttggacatcacaaacagacatctcggagtctggagctccaaggagaggtctgggctggaaatatacatttgtgagtcactggcatatagatggtatttaaagccacgagtatggatgagatcacctaggcagagaatatagatagcaagacaaggccccatgctgagttggctggagaaggagtcctgagaactggtgagtgtggttccagggctctgagtcagggacaggtgcacctgctgggaggcagacggaatggaaagagagagaaccatttgatttggcagattatgagctcttttgtggacttgatcaaagcagcttcagtggattggtggggactaagccagattagaagaggttgaagaattggctgggcgaggtgactcatgcctgtaatcccagcactttgggaggcagaggcaggcagatcacctgaggtcaggagtttgagaccagcttggccaacgtggtgaaaccccatctctactaaaaattaaaaaattagctgggtgtggtggtgggtgcctgtaatcccagttactcaggaggccgaagtgggagaatcgtttgaacccgggaggcagaggttgcggtgagccgagatcgcgccactgcactccagcctgggtgactgaatgagactccatctcagaaaaagaagagattgaagagtccattaaagatgagggagtggagacagcaggtgtagatgacccagagttgcccgtctactctagaatgatgcgcatctatgagttctctcccttgtcattcttgaggtcagggaccgtgccgtggtgatttctgagtcataaatggagtccagccagtgcgtagcaggagctcagcacgtttatgtcatggatgaataaatgggtgaatggataatgcattgtttgggtcaaaatggcctttactagtagagatagcttaatgtttttgaagcatttgaggaaacaaaagaaagtcaaccccaaaggccataggttctgtgtcccttctcccagctaacctcaaggagcagttgcctgtgggcctggggcacgagccctggcccagcgtcgggaaccaggttatttatttattgagacagagtctcgagtgtcacccaggctggagtgcagtggtgcgatcttggctcactgcaacctccacctaccgggctcaagtgattctcctgcctcagattcctgagtagctgggactataggcacgtaccaccatgcctagttaatctttttttttttctttttctttttgagatgaaatttcaccctgtcacccaggctggagtgcagtggcgcaatttaggctcaccgcaacctctgcctcttgtgttcaagcagttctcctgtctcagcctcccgagtagctggggctacaggcgcatgctaccgcacccggcttatttttgtatttttagtagagacgtggtttcaccatattggtcaggctggtcttgaactcctgacctcaggtgatccacttgcctcggcctcccaaagtgctgggattataggtgtgagccaccgcgcccagcctttttttggatttttagtagagaggagatttcatcatgttgggcaggctggtctcgaactcctggcctcaagtgatccacccatcttggcctcccaaagtgctgggatcataggtgtgagcaccgcgcctggcccaaaaaccacattactgagtcccttctgctgcctctcacatgccttgtggctttggataaatcccttcctttttcttagaagtgatctgcatggcggctcacacctgtcatcccagcattttgggaggccagggtgggagaatcacttatgcccaggagtttgagaccagcctgggcaacatagcaagactccatctctgcaaagaaaaaaagaagtaggctgggcgcagtcgcacacgcctgtaatcccagcactttaggaggccgcggagggcagatcacttgaggtcaggagtttgagaccagactggccaacatgatgaaattccgtctctactttaaaaaactacaaaaattagccaggcatggtggcatatgcttttgatcctggctactcgggaggctgaggcaggagaatcgcttgaaccaaggaggcagaggttgcagtgagccaagatcgtgccactgcactccagcctgggcaacagacagagactccatctaaaaaacaaaacaaaacaaaacaaaaaataggcaggtgtggtggtgcacgcctgtggtcccagctacttgggaggctgaggtgagaggatcgcttgagcccaggaggtcgaggctgcactccagcctgggtgacagatagagcaatatcctgtctcaaaaaaagggaagccatcagcgcagcacaggggaagcagcccacgtgagccagtcccatagatattcgtttccctccttccccacccccgccccgctgccccctttttttctctctctgggctttttacttgtttaggaactcgaagcggttcatggcaagtaccccgagtcctagcccacctgctctctgcatagggttgcggcagagcacctcacacgcgcagatacacgcctggctttaggggaagtcgcggcactgggtctgcagagtccgctgagcacgcaccttcgttgtgaaactaaggaaaccctggagtgtccttgggcttgggtgggatggaacatgcccgtgacagacaggcccacctgccaatcagaagggcgctctccttagctgggatggggccgcaggagtggaaatggctgttgggaggtggcagagatgggagatggggtggccacgggggagccgccggccacagaagaggaaacggaggtgcagggagcggagtctgcgaaggacgcgtggatggccaagagatgtgcctcggaaagggccgagggacttcctctgaccaacccccgacggccattcccagccatccgttttcctgcagccgcggatgcaacctgtggaagaggcgggaggaggcccgggagtccgccccgctgcgcctttcctagggtgggagcgtggactcaggcgcggccgctgctgccacctagtgggagacgcctgctactcctctcggttcctaaccccagggtcgttcccggctgagcactaaggagggggcgggggaggacggagagagccctgtgcccctggatctgcggataggatgcaagggggagcctcagagaggaaccccccccccaggaagtgtgcattgcccacactacttttcccctctgtgccgtgatttcctcccgtgtataagggaggcaagagtacctgcctctgggctgggcttggtggctcacgcctgtaatcccaacactttgggaggccgaggcaggcggatcatccgagttcaggagttcaagaccagcctggccaacatggtgaaaccccatctctactaaaagtacaaaaatcagccgaacagtgatggtgcgcgcctgtaatcccactccaggaggctgaggcaggagaatcgcttgaacccaggaggtggaggttgcagtgagctgagattgtgcgtctgcactccagcctggcggacagagtgaaactccatctcaaaaaaaaaaaaaaaaaaaaaaaaaaaaaagagtacctgcctctgagggtcagtgcaagagcaaatgaacaaatttgtgcaaggtacttggccataaatggggtccagccagcatagtaataggtgttcaataaatgctacctgctgggcatggtggctcatgcctgtaatcccagcactttgggaggccgaagctggaggatcacctgaggccagaagttcgaaaccagcctgggcaacatagcaagccctcatttctacaaaaaatgcaaaaattagccgggcatggtggcacatgcctgtggtcccagctactcaggaggctgatgtgggaggatcacttgaggccaggagttcaaggctgcagtaatcataccactgtactccagcctgggtgacagagtgagaccctgtctctgaaaatacataaaataggccgggcgctttgggaggccgaggcgaacagatcacctgaggtgaggagttcaagaccagcctgaccaacatagtgaaaccctgtctctactaaaaatacaaaaattagccgggtgtggtggcagacagataaaaggaagggatttatccaaagctgtaatcccagatactcaggaggctgaggcaagagaatcacttgaacccaggaggcagaggctgtagagagccaagatggcgccactgcattcccacctgggtgacagacagagaccctgtctccaaaaaaatgaaaataaataaaacaaatgttacctgtggttgatccaaggggtaaccggaggtgtgtggccctgtgccaccaccccaaattgtgcctgttgtccaaacacagcttcctttagttcgggctttcagcaagatggccgtgccgcatccctcctctttgtaaatgctggggctgccaccattatggttttatcatcagcgacattccagggggtgaagactggtcccaacctctcttctcctctcctcttctgatgagagtgagggatgggggaggggtcccagctcctagcactttctcccctcaccccaaagtgccatcagaacagctctgggctgtgacatcacagagcccccacctcatgataggagtcatgaggctgtggccatgggtgctggtgtgggtgtggctggctgcactaggggccatagaaactggtaagaagctgtcttgggagcagcaggaaggcaggcagctctgggagcataaagtgtgatgcccacttagggactcggaagccaaccctgcaccctctcattttctctccactcttctctcccatcctgctggtcccacctaccccccaacaaccgcgagccttgtcgtggtgcacccagctgaccctgagggaaatcaagaccctccacagcctctgcaataaggctgggtggtctcacagggtcccaagtcagcttccgcctcgagagataaaggcaggggtcagcttggctgttgtcacagagtttgcttgggtcctagcacccagacccaagcgtgccacggcgtcagccctggggacagagtctccgcgcttcttagacagacctgacttcttcgattatccggactcagaccaagccaggctgctggctgtggcccagtttattggagagaaacccatcgtgttcattaactcaggtatgaaccagcttgagaagggacctccctccccgccagggtctggaggagagcagccccagacccttcattgggccatcagaggggagttaagggtcctgtttgtctagcaggttccagccccgggctcttccatcacatcctggtgggcttgctggtggtggcgttcttctttctccttttccagttctgcacccacatgtaaggcctgccccctttctccaaccccacccaccaccaccttccttgggagcggctgaagaccccagttctagcggggcaggctgtgacctctcccctctgatctccatgccccacagaaacttccagaaaggggcctaaagagccggacaagggctctggactcaacctgagcacccacacccacctcctctcctgttgatgagcaaaagttccctgctttcctcctccctgactgcccagcgagcagctggggatcctgtcccctctgtttcccatggcccaagccccccacctcctcccttcccagccccaaagaacttggtggcaagggccttggtggcgttcacgcagatcgtcttttattagcggtctgtaaagcacctcccagggtcccccgaccccagattggaggaagccttgagaggtcagtagcaccagggacatggcagggcccgagggcgcgatgtgcagccgatggtgagggactgggcgccctcgcctgcccccggggttgtcagcactgggaaggcttgggggtagcagccacctccttcccccaacccaacagactagttcaaatttgggtaaataaataaaataaataagattcctcaagctggcctaccctggagaggagccgtggttgcagccggccactcgggaggcccgagggccagcgggggttagttggggcgtcctctcctctcgggtgatggggagccctgggggatggcagcataggggctgggatggccttggcagaggcgtctccccacattctgactcctggtccccttgaaaccctgttggtgtccctccccacaagccctcctgccctcagtgggtgggaggcggtgccccctcccctcctccagcgcaagggtgtgcaggaagggggcagagtagggggaagaggtcccctctctccaccccctcagtccccgagagatggggcctcttccctttcggggtcatcgtcagtcctggggttgtccgggcaagaggaccctggctcccaaccccagccatcagccccagagccctgtctccacgggggtgggggtggggagggggagggtcccggcccccggcctcagtcctgggcctggcaggccgggggcggccgggagcggggccagaagaggcggcaggccccacggcagatgaggaagaaccagtagagctgaggggccaggagcagcgcagcgcccaggttgacgtgggcagggatggccaggggcacggccagcaggggcaggccggcatggcgcccgtaggcccagtacaggtagggaaagagcagcacccggcagcagaggaagctgagcagcatcagggccccgttcaccttgtgcagcagtgtgtgctgctgcttgtactgaggagacacagacacagtggccacggcagcagaagggctcggccccccttggccctctccctgcctccctgcgaccctagcaggcagctcctcccaaaccagacactttgccaggacacaagcaccaggtgctcaaaatgcacggggtgagggggggatgacgaaggggctagagcccttggcagcaaccttgaaggtccctccccttcctgtgacctccccattgggctcctgcaccctcccatgctcactcacctggatgaggatcttgccaaggcagacgaagggcgtgctgacctctgccatcaacatgcaacccagaaagaagtctcccttaccctgtcgccacacctgggcacagaggcaggaaggtgaggagctggggctctccctgggttcttgggcagcccccgcccttcctctttcccctctgtcactttgggagatgcttgactctgaacatcagaacacctgggtgcagggctgggtgcagtggctcacgccggtaatcccagcactttgggaggctgaggcaggtggatcacgaggtcaggagtttgagaccagcctggccaacatggtgaaaccccgtctgtactaaaaataccaaaaaaattagccaggcgtgttggtgggcacctgtaatcccagctactggggaggctgagatgggagaatcacttgaactcaggaggcggaggtttcagtgagccgagatcacaccactgcactccagcctgagtgacagagagagactccgtcttggaaagaaaaaaaagagaaagaacacctgggtgcaggagcaggtgcatgacttggctgcatccctctcacggtcctgcagaaagactgtgtcccttatgtaacaggtgaggaaactgaggctcagagacgtgcaaccacaaatccaaagagccacagccgggcatcgtccagcccagggccaggctgcccccacaccctggtgccctgggctggtgctcagtgaaccctgcctgtccacagctttccctgggaatacgctgggtctgcttggttgtcagtacgcagacccggggcttcccaggctcctgccagcaccagcaggaccaaggagcaggccacccgcaccccgcccgcccagctccccgggactcaccactgagagtgggaagcacaccagcaccatggcggcatggtggagcaccatgaggaactccttgtgcaggtagccacgcgctatggcccacgtgctgcccggggctctggccgctccgtcgtcccctccatgccctttgacctggtgcttgtgccagtgacagaggaacatggcgtagatgtcgtagatgaagtagggcacagcaaattgcgtgtaggcagaggacagccagtgtctgttgggcagagagacggggtgggggagcaaggaggaaaggggacaccagtgattggggtcagatctcaggggtcagcacagcagccctggacaggagcggagtcttgggtacagatgagggatccagagggtagagggtgagaaacttgcccaaggtcacacagtcatgcagctagtaagagatggtgctgggattcaaacctgtggtctcagaactcacccatgttcctctctctctgcagtatagtcgggggaaaagaaaagaccagaagatgcccacagaccaaaaggcacagatacagtgccaaaataagcccaggacaggcaggtgggaccttgccatggttatttgtcctaaccttaccatgaggttaggaccagcaacagctgaaggggcgagagtgctggagagagaggtcacaggggtggacgcccattcctgcctcctgggacaggcgatcttccaaacttcccatgcatagccttatttacccctcccaaaaccctgtaaaaggtaggtgtggccatcatccccactgtacaggtgaagaagtgagtcacagaggggctaggtaacctggccaaggaagggacatgggcggtgtggctccacagccctcactgtcatccccaccatccccagaagatccgagaggcatcagagacagaccctgttggcaagtgagaggtcttgtcagcgctgttcgccctgccccaaagtcacccaatctcttgtctattttgtgttgtttttcagggacagccaagcgttaaggggaaaatgcagagcaaaaggagccaaggacaaagaaagttccatgtacttggagagtaaacaaaaacgagaaatggatgaatagacaagacagcatttttcttctggagtcagcacattggcagtttctcttaaatcctgtagtcccaagactggcctggggtgggggcaggaggtcagagaggcaggacctggggtgctcgccccacaaggggtggagggatgaaagcagagtcagccagaagccatcaccaaacatgaggcacgtggaggaggctgtggagaagttggggctgaggcctctgaggatggggagcctgaggcaggcggcctgtgagtggagccaacccattctccagcagggacggtaccagggaaaagggaacctgagactggtgcagtggtgtggagctgcggcccagaggcagggaaagatgagaggggaggggcagctgtagagaacgcgaagcgggaacacagggagagaggtcccaagtggcctggaggagtcagggcaggaagctgcccagaatgcaggcccagcagaggtgatgggagatgggacagctgggctggtgcaggagaccaggaggggccaccaggccctgggctgtcatgtgaggtgttagatcccatccccaccctcttggcaattaggtgctcagaagtaggaacagctgctgccctggattaacccggatcctccccacctacctgaggattaaagcagggaagacggacaggaacagacacaggggggcctggggagcagggggtacagaagctaaacggtgacctctgcatgtgaaggctggggaggaagtgctggatcccaggctcagcttggagcaggggagggaaggggtgggcagaggccaagaagcagccaagtccctgggcggggtctgaagaaagagttaagccaagaactgtcctctgcagctgccacttaactcaattcctctcgctgaagcccttccaggaagggccgctgcctcaccacagaagaggcaactcatcttcgggaaaagaggaggcaaacagaaacagggcaccccccatcaggggcgtccaaatgttccctgggactcagtggctgccacagaagggaagcggtgctgaaagctacaaagggggcgttgtgggcacctctaaggcaacttgcaacgggccacccgtgggtcacctagggcggccgtcagcaccacggacagggcccctctcctccccgtccccccgcctcctgcctgcacacctctgggcctttttggcaaccaccagacactgcagcagctgcctggccacattttggcctcttcaccctcatcccctcccgcactgcctggccgtgtgtggccttgtgcgtgtcatctctcccttgtcctctccctcaggcatggagtggatgccggatgcctggattatgggaagggctgaggggtgagcctggcatgaggagggggcaccccatctgggtgctggctggaaatggggtctgcctcctggggtggaaggcagggaggaggtggggaaccacgacaacacgggagacctggaagccgactagaaagcgctttgaggatcctctctgatccccgctccttctccccctggttctgacctttaaggacaggacaggataaatttatccctgggtgttgagttgcggttattgcagttaacttgctcaggcccaagttaagggcttggggaccacagacagagttccctccaagatgtggggtcttccgggattacccgtacacgccaaccactggcacctgggcaggggggtgtctcgcagcacttactggtcatcaatgatgtgcttgcaggaggtggagacgatgtagccggcagtggaggccatgatggcctggacagaggacaccagcctgggggagagagggaggcgtgctagaaaggcagaagggaagaggcgtgtgccttgatttctcctcgttgctagtctaacgactgcgctttgcgttcagccacttctcgggccagtccttgcctgccttcgcccaaggctgggctgcctgaggtgtgccccaccacaggtacctcacggctctccggcccgctcggctgctgttcctcagtccaccccactccttgccaccttcttccttccccatttgtggaaactgagtctccctcttctcaagcccgcagggtgtctgtcctgaggtgagactgagagtgaactgctggcctggacctctccccacgaggggagcctgggccggttcttgccccgcttagctgtccagtcatgacgcaggcctcactctggaccctttgtgaccccgagttccccagtcactttcccactgtctcctgactgccaccagcctccactctgcactctggccctgttctaggggtgtagagttgtaccatccactcctccatccctggcccccaaacactcaccctgaatgacacctagctgtctggccctggcctcagtccctaatgtcttataggaatgtcttcgccgcatgctggccctgttttggagggtgggagggtgtacggggaagaagagagaggcgggctgaacactagtagaccagatggccgggctggatgaggtctcccagaacagtgagcaaggcaggcagtgaggagagaggaagcctgggggtaaagccccggacccccacaggagctcccagtcccccaccgctgagggtccagagaagtgccaggtcccttccattccctgagaagcccaagaagcagacaggggctgaggggaaagaaagtggtttacctggctgagacaatgactgcgtcggcctcctcccagcgtagctggggcagccgctggagcgtgttcttggagaggaggaagagtccggggaacaccacccccccggccaccatcggggtcagcatggtggctcaggacttgggcagggaggcaggcgggccgtgaaggggcagggaggccgagtggaaggagttaggggtggagaagggacgccaagcccgggaaggagggagaaaacgatgagaaggggcacaaaggggccagggcggggacgggatggggccagggagtccgatgaaactggggagtcgggagggggctggctgggcagagacgggggaggggaggatgggagaaggggagcaggagcaggccagcgagggatggggagaggcaaagaggggatggcttggtgagggacagagaggaagaggggacaggaggaggaggatgcggatgggggaggggagggagccaccaggcaggtggggaggggaggcttacgtgagaggctgggagggcccgaggaggcggggagggggtgggggtgggtctgagtaccagccccaaaggaaggaggtgggcgggagggagcggaggagcagccgggcaagcggtcagcggtcaccaccgctctcctggctccactgcctcctctcgctgccgccccagtccctgccgcccggcacagacaccgcacatggcatcatcatagagactccgtgcccagccccctgccccctcggtggggagggggagggggaggggaagtggccagcttggggaggacgggggaggggcaggaaaatgatggcaccgaccagacaccgagaaaccggacctgcagcggcgtctccccatgcagctctgagccacagccgcggctgcgacagagatggggggagcagagaaagagggagggggaggcccttaaaggaacagcagctgcggtggcacagggggctgctggggacaggggacaggggccagctcttctcttggggaggaagggggcccagggctccttggccagctgggagggggccctgagcccccacaggggcctgaccctgcttcccatcagcactttgcaaatgcctggcatctcctccctcaccaagccatccctctgtggcctgccccgggtccgagctttgggtggccattccagcggaagagagcgttccctgggagagggagtaagtggtgctttctcagaaggaagagctgaaggaggggataggagcaaaaacatctcaacacagcatcctcagagccagaggccccctcacccgatggcggggaaggaagctgacattggccagagggggcacctgactgtgctgcagggctgcccatgtcctgtctgctgcaggagctccgaggtcactgcgtctgtccttcccacagggccatcaacgatcctgaggctccctgaggtcacccagttcagaagtggcacagccctctcattgcaggcgttggaggggcaaggagtggaagaaggggaaacggtggcgagagcgcggggcagctgcctctcaggaagtcccagggagccctaggatgcccaggccctgttcttcagactgccagcccctcctggccttctctaaattcccacccctcactttttcctcagtttccttaatgctactagctcccctttctctgcaacttccacatacagcctagtttcagagtgggaaaggactgcggggtgggctggtgcaagctcctcactggcccataaggaaagtgaggcctggggactgggcccgggtggagctgtgggacctgagccagagacactgccccctttgacttctggcctcccatcctgctcccaactgtcctgtggacttcagcatgacaagggcctgttatgcaaactcctttggtctccaagttcaatagtcaaccctatggtttgcctttctctgccagagcccactcctcgcctcccccaaagaaaggccagggactgggatttgctgttttgtgctgccctctagcggcaatctgtaggaaagcacccaagaagtctcacgctgatttagagacggttgtagagacaatagcggacctagctcctgtcctcagcccttcacgggagggggaaaggggatccagctccctgagtttttactacatgctgggcacagtaccaggtgatttctactggttcttacttggtatccctgttttacagaagaaacaggtttagaaattttgtggggttttttttttttttttttttttgagatagggtctcattctgtcccccaggctggagtacagtggcgcgatcatggctcactgcaacctcaacctccccgggctgaaatgatccttatacctcagtatccccagtagctgggactacaggcgcacaccaccatgctcagctaatttttgtattttttgtagagatgaagtttcaccacgttagccaggctggtctcaaactcctgggctcaagcgatccacccacctctgcctcccaacatgctgatattacaggtgggagccaccacgcccggatgaaagctgggtttcaaacccatggttgcagccgggcaaggtgtctcacacctgtaatcccagcgctttgggaggccaaggctggcgaatcatgagatcgagaccatcctggctaacacagcgaaaccccgtctcttctaaaaatacaaaaaattagccgggcatggtggcatgcgcctgtagtcccagctacttgagaggctgaggcaggagaattgcttgaacctgggaggcggaggttgcagtgagccgagatcgtgccatcgcactccagcctgggcgacagagcgagactccatcttaaaagaaaacagaaaaaccaaaaaaccatagttgcataaccccaaagccactcatgagcaaaactgcaaaaaggacagaggctggggaggctgggtgatgggcggccaccgtaactactcgattgaggactacaaggctggtcatggaactgtggtttcactttggatgagtagagacaggctttttttgtctgccagggaatccacgtagacaccctagtaaaatctgtgttccgtgtacctcctacgcctcctgtggtttgctgatactgcacttttatggtaagctttgtcacacaggtcatagatctgcagcccaagggcccaatccggcccacagacatgttttgtttggccagtatgcagttgtcagtatagtagttcttaaataaattcttagttacttatcagtattcaagaattggaagaggttgggcgtggtggctcatgcctgtaatcctagcactttaggaggccaaagtgggcagatcacctgagatcaggagtttgagaccagcctggccaacatggtgaaaccccgtccccgtctctactaaaaatacaaaaattagccggacgtggtggtgcacacctgtaataccagctactcgggaggttgaggcagaaatgttgcttgaacttgggaggtgaaggttgcagtgagccaagattgagccactgaactccagcctgggcaacagagtgagattctatctcaaaaaaataaaaagaattgggagacagcccaccacaatgacatgcacctgtagtctcagctactcaggaagccaaggcaggaggatcacttgagcccaggagttcaagaccagcctgggcaacatggagaaaccccgcctctactgaaagtacaaaaattagccaggcatggtggtgcacacctgtagtccaagaaactcaggagtcagcccgattctcagggagaatcacttgtcagggaggtcaaggctgcagtgaatcatggtggtgtcactgcacttcagcctgggtgacacagtgagactctgtctcaaaaaaaaagaagaggccgggtacagtggctcatgcctgtaatcccagcacttcggaggctgagaaggaacaatcctgtgagcccaggagttcaagactagcttgggcaacatagtgagaccctgtctctaccaaaaaaaaaaaaaaaaaaaattagccaggcttggtggtgcattgcctgtagtcccagctatggcaggaggattgcttgagcccaggagttcaaggctgcagtgagccatgatcgtgccactgcactccagcctaggcaacagagcaagaccctgtctcaacctgtctcaacaacgacaaagaatcataactccgaaaatattggcccacgttctaaccatataacattatcagtggctggagctgagcagcactggccctcagcagagaaggtgagtcctccagcctatatcatccctgcagagcccacagccctcatattatctgcagcagttttcaacccctgctctacagacgctgattcatatgatcctcacacaacatctccacgaagaaaggaaagtggggtgttattattaagcccatttaccagtgagggatctgaagttcagagaagttaaatgactcacaaaagaccccactgttggtgtctttttttctttttcttttttttttttttgagacagagtctcactctgtcacctaggctggagtgcagtggcgccatctcagctcaccacaacctccacctcccgagttcatgtgattcccctgtctcagcctccagagtagctgggattacaggcacctgccaccatacctggctaatttttgtatttttagttcagacagggtttcaccatgttggccaggctggtcttgaactactgacctcaggtgatccacctgcctcagcttcccaaagtgctggaattataggcgtgagccaccacgcccagcctgctggtgtcttttgactccacattccagctccactccacactctgcttctgctttcaccacaaactcattctgaaagtaaaagatcagttccaccagccatggccccaggaaggacaccctcaccctggtcctcttacttggatgctaccaggacagcctcttgtctctccatctgcaggttggtgtggttctgcaagccccagcgcagggcagtgaagcacaacgggaagaagacgcaacccactgcgaacagcagggtcatgcctgcctgcagccaagaaggcagaaaaagacggccatgagaacacctcaacacaacaccctcagaccccccagcagccttcttcacccccaatgaggcaagccccaagagacccatccatctgtggccattgaaagccaccaggcaaacctcttctctaagctcctagcatccttattactcttttaatattcctcatccggggcaattcgacatcctaattatcccaattttttgttttaaacactcaatttagacaatttcttttcttttcttttcttttcttttttctttttttttttttgagatgcagtcttactcttgttgcccaggctggagtgtggtggcgtgatcttggctcactgcaacctccacctcccgggttcaagcaattctcctgcttcagcctcctgagtagctgggattacaggcgcccgccaccatgcccagctaatatttgtattttcagtagagacaggactttactgtgttggccaggatggtctcgaattcctgacctcaagtgatctgcccgcttcggcctcccaaagtgctgggattacaggcatgagccactgcacccagctcctcctactcttaaactccaccattttccatcttctgcatgccccgcccgccgcccaccctaagtcacctctaccttctccccagtcctcacctcagagggacaggttggaagacagaaagggaggttgatgtttctcctcagcacccagaacttggaaaaaggaagggagggggttgtcaagatatttggaactttaaaatgacatttgttgaaaaaacaaaataaagccaaagcgattgttgttccattaaaaaagaaaacaaaagaaataacaggtgcaagcctgaaactacatatatttacatagatatcatttttgtttagaaagacctcccctcccatctactctggggagcagaggtgtggagcaggcacaggcaggatgaagggaaccaggtcctgccatcctgccttcctgaagtgtcttccaagggaccttctcgggataaaaggaaggtgtcaaactgcaaaggcacgaggctgctctgtagaggcagttggggagggcaggagtatgctcttccattggtggagtggctagaaggtgccatcctcctaatggcccgccagttgatacatgtgccctatcatttgcttcctgtgggggctggggggcggttccagcaagccttgcctagaattggccaattagaatccattggtgacttgatggacagctatgtttcagggacagggctcaaagaaagaaaaggagaggggaaataagagcaggtgcagggccgggcgtggtgactcacgcctgtaatcccagcactttgggaggctgaggcgagtgggtcacctgcggtcaggagttcgagaccatactggctaacatggggaaaccctgtctctactaaaaatacaaaaattagccaggcgtgatggtgggaacctgtaatcccagctattcaggaggctgaggcaggagaatcgcttgaacccgggaggcagaggttgcaatgagccgagatctcgccactgcactccagcctgggcgacagagactctgtctcaaaaaataaataaataaataaataaataataaaataaaaaaaaaacagcaagtgcagtggttcaggctggaatccccgcacctcagagaccgaggtgggaggatcacttgaggccaggagttcaagaccagtttgggcaacatagtggaacccctgtctctacaaaaaattagaataataggccgggcacggtggctcccgcctgtaatcccagcactttgggaggccgaggcgggcagatcacggggtcaggagatcgagaccatcctggctaacacggtgaaaccctgtctctattaaaaatacaaaaaatttagccaggcgcgttggcgggcgcctgtagtcccagctactccggaggctgaggcaggagaatggcgtgaacctgggaggcggagcttgcagtgagccgagatggcaccactgcactccagcctgggcgacagagcgagactgtgtttcaaaaaaaaaaaaaaaaagaagaagaagaagaataaaatagtccagtgcaatgacatatacctgtggtcccaggtacttggaaggatgaggcgaaagaatggaaagaattgcttgatcccaggagttcaaggctgtagtgagctatgatcataccactgcactccatcctgggcaacagagtaagaccctgcccccccaaaaaagtagtcctaagtaattattgatttaaaaggcggtgtaggataaaaggtaaagaaggccatttctactgtgggtgtacatggacttcaaattcagagtccacagataatcaaagaaacatttcacttccctattgctgaaataaagaaacaaataaagaaacacactgtatggctctgtttacatcaaattcagaaaagcaaaacatctatcatgaaaaatctgaacagcgtttaacttggggaaggtattgactgggaggagaccccagggaaccttctgaagtgttggaaatggccttatattgatcaccagtgtatacatatgtaaacattctcgaggcatcctcttaaaatgtgtgccccttaagtgaagctgcagtttttaaaattctaaatttaggctcttcctttctctgaatgatggtgggcaaagcctttatgggcctcaatttcttcatctgtgaggttgggttaataattagtgtcacatcattaaatgctgcttagactacaggtcagacattgatctgcattctctgactctaaaagaaaaaaaaaaggccaagtgtggtggtgcacacctgtagtaccagcactttgggaggccaaggcaagaggatcacttgaggacaggaggttgaggctgcagtgagctttgatcacgagactgcactccagccttgggccacagagtgcgactccgtctctaaaaaaatcaattaagggctgggcgcagtggctcacgcctgtaatcccagcactttgggaggccaaggcgggcagatcacaaggtcaggagttcaagaccagcctgaccaacatggtgaaaccccatctctactaaaaatacaaaaattagctgggcatggtggcatgtgcctgtaatcccagctacttgggaggctgaggcaggagaatcgcttgaacctgggaggcggaggttgcagtgagctgagaagccgagatcacgccactgcacttcagcctgggcgacagagcgagactctgtctcaaaaaaaaaaaaatttaattaaaaatatcaagtcatttatccaaagcaaccttgtgggtagggattattactgcacctctgttttacagatcagaaaacagaggcacagagaggtttggtaacttgtccaaggttaaacagtcaggaagtgaataaaaattttttaaaatcatattttctgaatttatttgtccctataatgttaggcagatatagaaaacataaacttattttcctaaggaactgaaaggcttttttaaaaaggagggaaaaaacaccactgaatacaatttagacatcctcattcatattttcagaacttatccttctcctcctccttcctctcttttttttttttttttttttttttttttttagatggaggttcgctcttgttatccaggtatccaggctggagcgcaatagcgcaatctcagcttaccgcaaacgtcgcctcccagattcaagcgattctcctgccttagcctcccgagtagctgggattacagccatgcgccaccacgcctggctaattttgtatttttagtagatatggggtttctccctgttggtcaggctggtctcgaactcctgatctcaggtggtctgctcacctcagcctcccaaagtgctgggattacaggtgtgagccactgcgcccggcttcttcctcatattcttttgagacagggtctcactctgttgtccagactggaatgcaatggcatgatcctacctcattgcagactcaaacttctggactcaagcaatcctccttagcctctgcctcagcctccagagtagctgggactacaggtgtgcacacaacactcagctaatttttgtatttaaaaaaaaatttttagctatgttctatggaaaggaatctttgtactttttatagagatggggtcttgctatgttgctcaggctggtcttgaactcctggcctcaagcaatccccttgccttggcctcctaaagtgctgggattacaggcatgagccaccatgctcggccagtgtttgcttctttagctactttattttcttccctctggatgggactctgaaaattaaaagttaaaccaagagcggccaggcatggtggctcacgcctgtgatcccagcactttgggaggcagaagggggtggatcacctgaggtcaggagttcgagaccagcctggccaacatggcgaaaccccatccctactgaaaatacaaaaattagccaggtatggtggtgcacatccgtaatctcaatcactcaggaggctgaggcaggagaattgcttgaacccaggaggcggaggttgcagtgatccgagatggtgccactgcactccaatctgggcaacacagcaagactttgtctcaaaaaaaaaaaaaaatatatatatatatatatatatatgaaaagatcctgagctggggtctgaaaccaggcagcctgccctgctatttgcccagctcctgcatagctcattgtgaggactaaatcatgccaatgcatagaaactacaatacttcacacggtagccagtagccagttactgtcattctgagcacccactgtatgccaggcaccaggctgaaatactttatatacatgttcccgtttaatcatctatgccaccttacaaataacttcctcattttactgctgagaaatctgagtctcagaaaagttgaatgacatgcttcagaccatacagtacatgacaaaatcggtaaatgtgaccgctgccttccaagtctggagaaaaggaggcgaagagaggggaaggcatgaggggaggagagaaggtgggagagggaaaaaggggaagagaagggatgagagtaggagaggcagaaggagtgaggaggagtagcacccctctgcagttattttctttttctttttttttaaatttgagacagagtctcactctgtcacccaggctggagtgcagtgacacaatcacagctcactgcagcctccacctcccgggctcaagtgatccttccacctcagcctcctgagtagctgggatgacaggcgtgcaccaccacacctggctaatctggggaggtttttttttctagagatgggatcttgctatgttgcccaggctggtcttcaactcctgggctcaagcgatcctcctgcttcagcctcccagaattctgggattacaggcgtgagccactgagtgtgaccagggatggtcattttcctctgcacctgtgcttaccctagacaagaaaatgtggaagggaggaaagtttacaggccatgagctggttagagtcaggcccgagtctcactggaatctggactctctcctacatttcttcctttccttgtcgatttcttcttgttgagagcaaaacagtccaaggctgcacaggcttgtctgagagagaaaatatgagaggagaaaattgtggttttgagcaatggctttaaatttttttaatagtgacccacaagagatatcttttattttatttctttatgtatttattttttgtttgtttgttttgtttttttgagacagagtcccactctgttgtccaggctggagtgcagtggcacaatctcagctcactacaacctccacctcctgcgtaaatgattctcctacctcagcctcccaagtagctgggattacaggtgcatgctaccacgcctggctaatttttgtattcttagtagagacaccatattggccaggctggtctgaactcctgacctcaagtgagctgcccgccttggcctaccaaagtgttgggattacacacgcctgtaatttttgtaaaatacaaaaaattagctgggcatggtggtgggtgcctgtagtcccagctacttgggaggctgaggcaggagaatggcatgaacctgggagacagagcttgcagtgagccgagatcacgccactgcactccagcttgggccacagagtgggactctgtctcaaaaaaaaaaaaaaaaaagtgttgggattacagaggtgagccatggcgcccagccgagatatcttttattttgtgactgcagttcatgcacccacacgttgaatggaaaacctttgcacaacacattctgacttactatatgcagtgccctgtggaattttctagaccatttttccaccaaatattgatcatgacccattaagccaatttcactgcccactagtggctaaacaagccaagcgggaaaaatcttggtttggagagcagtgtttctcaatttttctttcattattgttcccctaaggagccctttttacacttttttttctaatcgctgcctatcacgaaagtttaataacacagatatatttatgtctatttacatatatcttttccatattaaaaagagtaagttttttgcccccttgggggcgatattataccagttgagaaggcatcattgtcctaatgctcattttctgagccgcctttatttatttatttacttatttattttattttattttatttttttcagatggagttttactcttttgcacaggctggagtgcagtggcacgatcttgtctcactgcaatctgcccccgctgggttcaagcgattctcctgcctcagtctcccaaggcgcccaccaccacacccagctaatttttgtatttttagtagagacggggtttcaccatgttggccaggctggtctcaaactcctgacctcaagtgatccacccgctttggcctcccaaagtgttgggattacaggcatgagccaccgtgccctgcctctgatccgcctttatacacatcaatcccaacatccaatgagataggattagttccattttgcaagtgattaagtggaagctgagaggttatattaattattgaagattgaaatggctggcaattagactgggaatccagaaacttaccaatatcctaactcagcctctagcttctccaaacctttgtttccccacaaaaaaaaacctcagttatggtcagttatgggtgttttttgttgttgttattgttgttgttgtttttctctatttgacctaataagagcaaacattaggccaggcacagtggctcacacctgtaatcgcaatgctttgggaggccgaggtgggtggatcatgaggtcaggagtttgagaccagcctgaccaacatggtgaaagcccatttctactaaaaatacaaaaaaaattagccaggcgtggtggcacacgcctgtaatcccagctactcaggaagctgaggcaggagaattgcttgaaactgaaaggcagaggctgcagtgagccgagatcagaccactgcactccagcctggtgacagagtaaaactccgtctccaaaagaaaaaaaaagcaaacatttatagagcatttactagacatccggcagcaatctaagccctttatatatattaactaacataatatccacaataatcttaagacagacatactggggtttttgttttgttttgatttttgagacggggtctctcattttgtctcccttgatgaagtacactggtacgattagctcactgtaacctcaaattcctgtgctcaggggatcctcctgcctcagcctcccaagtggctgggactacaggctctcaggctcatcactaccagcttattttttaagtttttcctacagatgggggtctcgatttgttgcccaggttggtctcaaactcctggcctcaagcattctcctaccttggcctcccgaagtgctgggattataggcacaaatcacgtgtcaggtgagacatactctcagtcactgttcggatgaggaaattgaggcacagagaggttgtgtggcttgctcaaggtcatgcaggtagaaagtggcacaagcggggatttgaaccaagtaatctgattttcagagcacaggttgtgcgttttgttttgtttttcaccatgtattattttttgagatggggttctcactctgttgcccaggctggaatgcagtggtgccatctcagcttcctgcaacctccatttgccaggctcaagtgatcctcctgcctcagcctcctgagtagctgggaccataggcaagccaccaccatgcacggctaattttttgtatttttggtagagacagggtttcgccatgttgctcatgctggtctcaaactcctgagctccagcaatacgcccgatcctcctgcctcggcctcacaaagtgctgggattataggtgtgaaccaccatggttagcatgagctaaccatgtccttttttttttttttttaactctgtctcccaagctaaagtgcagtggtgcgatctcagctcactgcaacctccgcctcccaggttcaagcgattctcctgcctcagcctctggagtagctgggattacaagtgtgtgccatcacacttggctaatttttgtatttttagtagagatggggtttcaccatgttgcccaggctggtctcaaactcccgacttcaagtgatctgcctgcctcacacctcccagagtgctgggattacaggcatgagccacagtgctaaactaaccatgtactttattttctttcatttgagatgaagtttcgctcttgttgcccaggctggagggcaatggtgcgatctcggctcactgcaacctccgcctcctgggtttaagctattctcctgcctcagcctcccgagtagctgggattacaggtgcctgccaccacactcggctaattgtttgtattttttttagtagagacagggtttcaacctgttgcccaggctggtctcaaactcctgacctcaggcgatctgcctgccttggcctcccaatgtgctgggattacagaagtaagccactgtggctaccatgtactttaaaaggaaactttttatcactctggaaaatagaaaaccagtaccacctgtgataaacagaaggtaacaaaaaatatacaaaatgaaaacacattttataacattctagctagatactatgggcagctgctcattctgaactggaggctggctctctccttgttcaaaaaagaaagatcaggccgggcgcagtggctcaagcctgtaatcccagcactttggaggccggcgggcggcgggggggtgcggattaactaaggtcaagggttcgagaccagcccctggccaatatggtgtaaccccatctctactaaaaatataaaaattagccgggcgtggtggcatgcacctgtaatcccagctagtcaggaggttgaggcagaagaattgcttgaacccaggaggtggagatttcagtgagccaagatcgtgtcactgtactccagcctgggcgacaaagcaagactccatctcaaaaaaaaaaaaaaaaaaaaaaaaaaagaacaaaaagataagcacagagagaaaggtgttaaagggtttctggcagcaaattgagagtttctcctgcagtaatcagaagcgttgaaagggaattggaaagagaaagagagtagcttgttcagggtgtgtgtgtggtgtgtgtgtgatgtgtgtggtgtgtgtgtggtggggtgtgtgtggggtgggtgtatggggtgtgtgtgtggtgtttgtgtgtgtttgtgtgtgtggtgtgtgtgtgtgtggtttgtgtgtgtggtgtgcgtgggtatggtgtgtgtggtgtgtggtgtgtttgtgtagtgtgtgtggtgtgtgtgtggtgcatgtgtggtgtgtgtgtatttgtgtgtgtggtatgtgtgtttgtgtggtgtgtatggtgtgtgtgtgtggtgtgtgtggtatgtgtggtgtgtgtgtgtggtgtatgtggtgtgtgtgtggtgtatgtggtatgtgtgtggtgagtggtgtgtgtgtttgtgtggtgtgtgtgtgtatttgtgtgtggtatgtgtgtttatgtggtgtgtgtatggtgtgtgtgttgatgtgtttggtgtgtgtttgtgtgtgtgtgtgttgtgtgtgtttgtgtgtgtggtgtgtgtttgtgtgtgtgtgtgtcttcttgctgacataccacctaaaataaacccaagatgggatgcaccacatactctgaacccttgtcgggtggtcaatgggtgttcaggacatcccagcagaggaagggagacacaccagcctgtcctggcctgggtgtgcagccagaaagcatggggccaggctgggcaacacagtgagacctcctctctacaaaaagtcaaaaaaattagctgggcgtggtgctgtgtgcctgtagtcccagctacttaggaggctgaggtgagaggatcgcttgagctagggaggtggaggccacagtgagccatgatcgcgccactgcactccaacctgggtgacagagggagaccctgtctcaaaaacaaaacaaaaacaaacaaaacatagagcattaggcagtccaccacgtgtggaggggcagtgcagggcaggggtataggagggcccatccaagcctctgtgactttggccaccatctttccttcccctagcctgtctccccaggtgagtttcacccccaggcagtccttagagacccgccacccaatttacccttggccttgagtttaccgttctctgttcttccaggttctgccgcccacaggctgtttcactcatcctctccaccgggtgccctgcggaggtgtgcaagtgtgatatcatcaaaggctgtgaataagtaaacaataagtggccagaagtggcctgtttcccacatgatacccagggaagggtccgattccccccgcctgggctctggggcaagtcctggctggcgtgccagagcatttattatttagtatttttacttacctgtcccaggttagggactgtcccaagcaatgccagtcccaccctctatctgcacaccagaaaaagctgagggcacagcaggtgattggagtcagacagctaagggtccaatccctttcttctcacatagactggctgtgtgaccttggccaaatttcacaacctctctgagcctccactgagcacacaccaagtcccattgccaggcctaagtcctgcttctgccagtcactagcctggcatccttgtgcaagggattcaactcctctgagccttgggctcctcatcaatgaaacagcagcacctctacctggggctgctggggtgattaaatgagatctgtgtaaagcacagttgctatacacatacgcattgtgatattcattaatagtcattcaaaatgtatatatttagagatgagatctcgatctgtcgtccaggctggagtgcagtggcatgatcatggctccctgtagccttgaactcctgggctcaactgatcctccctcttcagcctcctaagtagctagaattacaggcatgagccaccatgccctgcctgttgtgtcatctgtctgtctgtctgtctgtctgtctgtctgtctatctatctatctatctatctatctagcgcaatctcggctcattgcaacctctgcccccagcggtcaagcaatcttcccacctcagcctcctgagtagctggggctacaagcatgtgccaccgtgcctggctaatttttgctttttggttttgggtttttttctttttttgagatggagtcttcctctgtcacccaggctggagtccagtggtgcaatctcagctcactgcaacctctgcctcccaggttcaagcaattctcctgcctcagcttcctgagtatctgggattacaggcacgtgccgccatgctcggctaatttttgtatttttagtagagacagggttttaccatgttggccaggctggtcacgaactcctgacctcaagtgatccgcctgcctcggcctcccgcagtgctgggattacaggtgagagccaccacacccagcctaatttttgtattttttgtagagactgggtattcatcatgttggccaggctggtctcaaactcctgacctcaggtgatccacccgcctcagcctcccaaaatgcagggattacaggtgtgagccactgtacgtggcctataattttttttttttttgagatagtgtctcactctgttgcccatgctggagtggagtggtgtaatcatagctcactgtagtctcaaactcctgggctcagccctggcgtggtggctcacgcctgtaatcccagccctttgggaggccaaggcgggtgaattacctgaggtcagaagttcaagaccagcctggtcaacatggtgaaaccctgtctctactaaatatacaaaaattagctgggcgtggtggcgggtgcctgtaatcccagctacttaggagactgaggcagaagaatcgcttgaacccagaaggcagaggttgcagtgagtcaagatcgcacaactgcactccagcctgggcaacaagagtgaaacttcgcctccaaaagaaaaaaaaaaaaccaccaccaacaacaacaaacaaaaaaactcctgggctcaagagattcttccacctcagcttcccaagtagttggaccataaatacacatgaaaattagaaaacatgcatgtctaatttttcttttttttttgtagagatggagttcactatgtttctgaggctggtcttgaactcctgggctcaaccgatcctttcacctcagcttcccaaagtgctgggggattgcaggcatgaaccactgcacctggctatatattttaatgagccttcattctatgccatgtgccttgcatacattttctcaaataatcacagaaagccctgccagtccctgagggttatccccactttccacatgagtacaactgaggctcagtgaggtcaattgacttgtccagggttgcacagatatactgtggcagaactagaattcaaatccagatctttcctggttctaaaggctttttttttttctcgcccaggctggagttcagtgacatgatctcaactcactgcaacctctgccctctgcctccccagttcaagtgattctcctgcctcagcctcccgagtagctgagattacaggcatgcaccaccacgcccagctatttttttttctttttgggggcggagtctctgtctgtcacccaggctggagtgcagtggtgcgatcttggctcactgcaaccttcacctcatgggttccagcaattctcctgtctcagcctcccaagtagcttggattataggcacctgccaccatgcccagctaatttttgtatttttagtagagatggggttttgccatgctagccaagctgatctcaaactcctgacctcaggtggtccgcctgccttggcctcccaaagtgctgggattacaggcgtgagccactgcactggcctaaaggtttttttcgttttgtttccaactgggccattattatttccaacctataagatggaagtaattgtttctgccactcgtgcctcctgtaaggattaagtaagataaagtctgtggagaggcctctgttgacaccagctctagctcagcactgcttctttattcccccagggtaattacctaaacacaagcctttcattttatactaaggaggctggtgaacctcttcttaatctctgggagatgatatcgttggatgtccattggaggcagctgaaagtattagatcagaatcagaactgccaggtcccttcccacgtccaagcctgctgaagcttctttcatcttctgggaactctgcatctctgatctcccacccaccccacgattattggaagtatacaatcctgtctgccctttcctaggggaagtgcggaactacatatgatacatctgacatctccagcttccaacttcgggagaggagactttgcggttagctggctattgtgaagtcagtttttctctgcccccagcaaatgttgtgatgtggatagaagtggggcctcggcacagccaggcgcagtagctcacatctgtaacccagcactttgggaggccgacgtggacaaatcacaaggtcaggagtttaagactagcctggccaacatggtgaaaccctgtctctactaaaaatacaaaaattagccgggcatggtggcatgcgtctgtaatcccagctatttgggaggctgagataggagaatcactcaacttgggaggcagaggttgcagtgcgctgagatcgcaccactgcactctagcgtgggcaacagagcaagactccatctcaaaaaaaaaaaaaaagagaaagaaaagaaatggggccttggcaaagtggggtgcatacatcatcccttgtcttggcttgcctggcaacacacaagcctggggcactgcccgtgctcctgcataatgtatgagcccatggtaggaacaaaacaccagcaccagcgagtctgggcactgcaggccacggacgtgtccaggggccttgccaaggctgaagtctctctgttggcagaatatgcagaatatgtgttcctggaggccttttgtagggctgaggtgagaactggcctcaacttggtcctcaggattccatcagacaataagaccgcccaaggccgggcacagtggttcacgcttgtaatcccagcaattcgagaggctgaggcaggaggatcgcctgagcccaggagttcaaaaacagcctgagcaatacagtgagaccccgtctatacaaaaaattttaaaaattagctgggtgtcgtagcatgcacctgtagtctcagctacttgggagactgaggtggaaggatcccttgagccaggaggtcgaggctgttgtggtgagccatgattgtgccattgcactccagcctgggctaccgagtgagactctgtctcaaaaaaaacaaaaacaaaaacaaaaaccggaagacagcctaagaagacaatcttctttaggatcaataatggtgacattagcaacagctagacttctgttttctgggcttgaaacgccctctgagagggccaggggtggccaagagggtggctgagaccacctcagtatggttgacagtgggagggaagatttggatccagggacacagcccctggcagtttccgtggctgcctcatggtgtaggaaaccccaggagcagcagctgtggtgaggtatgttggggtggagaacatggacaaaaataggtatatggtggcattgtttttaggggaaaatgccaggattcagccatcgtttaggaagtcggaggcctccatagagaggggtgcttgtgtgagcgtgcatgtgtgggtgtgtgcaagtgtctgtgtgtgtgtgatctaaaaaggttaggaatgaaacggggaggtctgagtgccttgaaagccaaggaaattaggacgtgtggaaaacaatgcttcattcgtggatggtgtttggtttcaattcattcatagaatcagtgagtattggctgagtgcagtggctctggcctgtaataccagcaacctgggaggccgaggtgggaggatcatttgaggcaggagttggagactagcctggccaacatagtgagaccccatgtctactttattaaaagaaaaaaacaggccaggcgcagtggctcacacctgtaatcccagcactttgggaggccaaggcgggcagaacacctaaggtcgggagttcgagaccagcctgaccaacatggacaaaccccgtctctactaaaaatacaaaattagctgggcatggtggcacttccagctactctggaagctgaggcaggagaattgcttgaatccagggcggaggttgcagtgagctgagatcacaccattgcactccagcctgggcgacaagagcaaaactccgtttcaaaaaaaaaaaaaaaaaagaaaagaaaagaaaaaagaaagaaagaaagaaaaagaatcagtgagtattcaccaaggctcccagggctaggccaagtactagagctcaggatacggagatgactcagaccaggccccagacacttgcagtctaattgtggagccagacatggaagtgaggaattcaagtatcttgtgagaagtgcgagaacaacagtatctgtaggatgctgtgggaattcacagtccaaagcagccacctctgcctgaggttggcagggagacctcacagaggcaaaactgaggacgtgcttgagggatgaggaagaggtttgaggggaagacagagggtgttccaggcagagggatcagcaactgcaaagctgtggaaatgtgagaccctacacactggttcaggaagcttcagcagatcctactgaaggtggcttatgcctgtaatcccagctacctgggaggctgaggctggaggactgcttgagcccaggagttcaagaccagccttaacaacatagcaagaccacatctctaaaaattcagaaaaaaaggctgggcacagtggctcatgccagtaatcctagcactttgggaggccaaggcgggcgggattgcctgaggttaggagttcgagaccagcctggccaacatggtgaaaccccgtctctactaaaaatacaaaaattaggtgtgcgtggtggcagtcgcctgtaatctcagctactcgggaggctgaggcgggagaatcgcttgaacccaggagacataggttgtagtgagccaagatcacaccattgcactccagcctgggagatgagcgaaaatctgtctccaaaaaataaataaatcaattaataaataaatcagtaaaaaagaaccgggcccggcgcggtggctcacgcctataatcccagcactttgggaagctgaggcgggcgcatcacttgaggtcaggagttcgagaccagcctggtcaacattgcgaaaccctgtctctactaaaaatacaaaaattagccgggtgtggtagtgcgcgcctgtaatcccagctactcgggaggctgaggcaggtgaatcacttgaacacgggaggcggaggttgcagtgagccgagatcgcgccactgcactgcagcctgggcgacagagcgagactccgtctcaaaaataaataaataaataaataaataaataaataaataaatataaataaaatataaaaagtagcattgatgtttacaatatccctgagcggcaggcgtttctcccttttgcagatgctcagtggcttggccggagatacatccaagtggtgggtgtagcctgggggttcaatcctcctgtggcgccccagaacccggtgcctcctccaacgtccggcatctgatgaggatccgacccaggcgggcggcggcgggattcgctcttccccttcgctccccgcgagaaagccccgagggccgcggcggcgcagagccggtgacagttgaagcttaggcgggaagagggaggcgcgaggcgggaagagggagtttgggcctcggcagccgccgtacaaacaccgctctggtcaccatggcaacagcgggatgccgcgaacggcttctgggcggggccggtccctcggacgattggacctagcttggcgcggaatccgtgaattgcccgcggcccgagggtgcaggtgatgggtgctgaccgactggggaagcccggagtgtggggactgaggaggggagtggcctggggcgcgctggagcctgcgaggaaggcgccgcctcggatcccccgccccccattccccttcccgaattccaccctccggcccagccatggcctcagtttccccaaacaggaaagggaaggagggtgggcaccccggtctaacggtgcctctcagcctctgagacccagaaccttccttctgcagctcccggactgactggctctgcccttccccatggacgtaagtccgggccccttcccctctctgggccccctcagcgccctctcctaaccccgaatgggcctgtcttccagcacggactggggagggggcttctacccaacagagactacaacctgccagctcaggacgagagctgtcaggaagagtccaggaatggacttcccacgggagggcacatttctggtattcctggcaagataaggagttgactaagtaatccacgagaaaaggcatttccggcagaggaaacagtctgggggtgagagggaggctgcagcatttggggaactgctagggctatcgtgtgtttggaagagggggagggagagaggtaggcagggctaaattgggaattttgtcactgacataaattttaagtgccaggcgtggtggctgtcgcctgtaattccagctactgaggagactgaggtgggaggatcgtttaagcccaggagctcgaggctgcagcgagccatgatcatgccgctgcactccagcctgggtgacagagtgagacactgtctctaaaaaaattgaccaggtgcggtggctcatgcctggaatcccagcactttgggaggccgaggcgggcggatcacctgagatcaggagttcaagaccagcctggccaacatggcaaaaccccctctgtactaaaaatacaaacattagctgggcgtcgtggcgcgcacctgtaatcccagctactagggaggctgaagtaggagaatcgcttgaacccgggtggcagaggttgcatgaaccaagcttgccccactgctccagcctgggtgacagtgatactccgtctcaataagaataataataataaaataaataatagaaaaagttttaagtgagttactgggagccattgacggattgtaagggagggagggatactacacaaggacatctggtgtggaaaggggcaaaattgcaggttggatgacaggagccggtaatgtgggctgagggatggtaaaggagtggcaagggagtcagagacaagagatctctttggagaggcattccagaaggaaaatcagccctagaagactctagaatgctgaagtgcttgatgttgctgaactgggaatgatagggaaaaaggcaggctcagggcacaagataatgagtcagggtgtagtcctgttgacgctctccccaccatctggtggccgttcctctcccagccacctcctcgtccctcatggtattcccgtgttcctgcagcccctctccatctccttgtcaccccttcctcctgtactcgtccaggcctcctctagcccgtggaatccaaccccggctcctgtcagcagccctcccctgctgctccccatccctgccatcgtcttcatcgctgtgggcatctatttgttgctgctgggtctagtcctgctgactaggaactgcctgctggtgaggggtctggtcggggataaagggtgggctctggggaagaggaatcccggtaacctgtcccttcatctgcaggctcttaccctgagacacttgacatttagcccttgcatctatccgttttgtggtaccagggggtccctcctctcctgtccccagccaaaccttttcctttcccctcgggaaagctgccttggctgtcactacctgctgcctattccacatcctgaaccctgtgacctaggcccagggctgctgcgcggacggtagctccccctgcaggaagcaaggttcctccgggcccccagactgctgctggacctgtgcagaagcctgcaactttcctctgcctagcccggcccacttcctggatgcttgctgcccccagcccaccagagctgtgagttccattcctaccccctgccccactgagccctgatctaggtatgatcggtgcattcatttttttgctcaacaacatttattactgagcaccttctcaaggccaggcacggttccagggcatgaatcatgtgcagccaggtaaaaacaacctatcagataatgcctggtgatgaaagctacttgaagaaaataaaatagggtgccagctggagaaaggtgatgtgggtaacatgtagagtacatagccagcacttctaaatgaaagtgagctaaatgaaagttagctaaatgaaaaaacagctcacacagctcctttccgttcaccgaatgaactgtgttctaggtatagggcctctttacggacctttgtttttcccaacaaccctgagaactgagaactaagttgtttttttttctttcctccctccagagctgggtcctcccgtctcctcccctcccctcttcttttctttttgttgttgtttgagacagggtttcactctctcgcccaggctggagtgcagtggtgcgatctaggctcactgcaacctccacctcccaggctcaagtgattctcctgcctcagcctcctgaatagctgggattataggctcacacaactaccatatggctaatttttatatttttagtaaagacggggtttcatcatgttggccaggctggtctcgaactcctgacctcaaatgatccacccgccttggctgcccaacgtgctgggattacaggcgtgagccaccatggcccagccatggttttttttttttttttttttttgagacggagtctcgctctgttgcctaggctagagtacagtggtgtaatctcagctcactgcaatgtccacctcctgggttcaagcaattctcctgcctcagcctcctgagtagtaggaatacaggcgtgtgccaccacgcccagctaatttttgtatttttagtagagacggggtttcaccatgttggccaggctggtctcgaactcctgacctcaggtgatccagagctgggtattttttaaaacctatatgttttttctgattacaaaaagtattatttacaaagtatacatatagaaatacatggaaagtaccaatcactttacaaacccgctctctatcccaaagttgctgtgttttacatgtatctctcatatactaatacagtactatcactgctgtattttaccattatttggcaaaaatggggtggtatcatgtaggttatttcatcatacctgctactgtccccctatcccccgccttttttgagacacgatcttgctctgtcacccaggctggagtctggtggtgcaatcatagctcactgcagcctctacctcctggactgaagcaatcctcccacctcagcctcctgagtagctgagactataggtgcatgccaccacacccagctaatgtttatatctttcacacagatggggtttcatgttgttgcccaggctggtgttgaactcctgggctcaagcgatctgccatcctcagcctcccaaagtgctgggattacaggagtgagccaccatgcccagcctctacttgccctttttttttttttttttgagacgagtcttgctcttgtcacccaggctggagtgcaatggtgcaatctcggctcaccgcaatctctgcctactgggttcaagctattctcctgcctcagcctcccaagtagctgggattacagggatgcgccaccacactaggctaattttgtatttttagtagagacagggtttctccatgttggtcagggtggtctcgaactcccgacctcaggttatctgcctgcctcggcctcctaaagtgctggaattacagatgtgagccaccgggctcagcctctacttgccctttttaacctgacatcacacttcgccacctatccatgcctgtatgtgtagacacataagggttactgtcctcctcctgaagtggggagtaagctggcttagggaagtttagtggcttctccagagtgttacgcaggagagccttgcatcgcaaatagctccacagcgttagctgaggtagaatcctcaggggagaagcctggcttggagaagacaacctgtttctatttgtgggtttaaagatgttaaatgtaatcgaccaccgtcctgaggaatgattattttgagctcagcgattcagacagcaaagcccctgcccttggagtggtgacattccttccctaggatggaaggggaggataaaagcaaattcataacttgggcatatggtgattggtgctaatccctggcatgttttcagttttgaagtaaattgtggggcaaggagcgctttttcagataatcaccttctggtttgccaggggcagtcagcagaggggtctcaggtttggggctgaggggcagaagggcaaaaggaggagaccttgggttctgaaaactcctgtcttggcgtggtggcactcgcctgtaatcccagctactggaaaggctgaggcaggagaatagcttgaacccagtaggcagagattgcggtgagctgagatcatgccactgcactccagcctgggtgacagagtgagactctgtctcaaaaaaaaaaaaccaaagcaaaaaaacctcttgccttagaggagatgctccattagaaaatgatttctggccccctgtcctggggatgccgccccctaccccttctgtctatttgaagtgaatagccagggactcatcacctccttgggagagaggatgggtgaggtgcattgtaaggatagactgggccttcccaccttccccacagagggctgcaagaactttcaaacctggagacatcaggccctgatcctctctggtttctgctggagctaggaagggatttaacagggtggaggacagggcaggttctttctgtccttgagctgtctttccacaaagtatatttaagtccctccctcttcagtttccttgtaataacagcccagaaggttacaaatgtcttgccacttggcagctgtagacactgaggcttacggaggttggagtgacttggaggttatatggctggatcagctggaatagaaacccaggtttctcttccttactgagggagaaacatgcctgctcgcctgctctgcttcttttttttttcttttttcttttttttttgagacggagtcttgttctgtcacccatgctggagtgcagtggtgcaatcttggctcacttcaacctccgcctctcgggttcaagcgattctcctgcctcagcctcctgagtagctgggattacaggtgcccgccaccacacctggctaattttttgtatttttagtagagatggggtttcgtgttagccaggatggtcttgatctcctgacctcgtgatccgcccgccttggcctcccaaagtgctgggattacaggcgtgagccaccacgcctggcctgctctgcttctttcatgtgcatgttgcaaggttctcattcattcattcattcattcattgactcactcaccaaagatttatggagttactgttgaggcactgtctagggccttggggactcagcagaaacaagatggagaaggtccccagcctcgcagggcttccattctggtgatggagagagagaaataaccaggccattacaacagagggtgagaaatgacgtgctatggagcagcggttgctcagccctgcatgcgatcagaagcaggtataggacttaaaaggaaagccaggcatctaggccccacactgaggtctgggctggggctagagtttgtgaatcttttacaagttctcatatgattctgatgcacacaggttaagaaccactgctgagggaagaagctatgataagaatagctctctttcaggccgggtgcggtggctcatgcctgtaatcccagcactttgggaggccaaggcgggcagatcacaaggtcaggagttcgagaccatcctggctaacacggtaaaaccccgtctctactaaaatacaaaaaaaattagccgggcgtggtggcgggcgcctgtagtcccagctactcgggaggctgaggcaggagaatgctgtaaaacccgggaggcggaccttgcagtgagccgagatcgtgccactgcactccagcctgggagacagagcaagattccgtctcaaaaaataataataataataataatatctctctttcttttttttttttttcccaggcagggtctctcttgtcacccaggctggagtgcagtgctccctctgttgcccaggctggaatgcggtggcgtaatctcggctcactgcaacctccgtcccccaggttcgagtgattctcctgcctcagactcccaagtagctgagattacaggcacctgccaccatgcccggctaaagtttgtatttttagtagagacaggttttcaccatgttggccaggctggtcttgaattcctgacctcaggtgatccacctgccttggcctcccaaagtgctgcgattacatacaggcgtgagtcgccatgcccggccaagaacagctctctttcgtccagcactcattacttaccaggcatcgtgcttagttccttccaccgattcccgacaatggccttatgaactaggtcttatattttttcattttattttattttattcttttgagatggagtctcactctgttgcccaggctagagtgcagtaaaacaatctcggctcactgcaatctccatctcctgggtttaagcaagtctcccacctcagcctcccaagtagctgggaccacaggcgtgcgccaccatgcccagctaattttcgtatttttaatagagatgatgtttcaccatgttggccaggctagtcttgaactcctgatctcagatggtgcgcccaccttggcctcccaaagtgctgggattacaggtgtgagccaccacacctggccttaggtgttatattcctataaatgaggaaactgaggctgaaaaaatgaattagccaagctgaggttcaaacccaggccttactgactctagggcctgagctttaaccatctatacgatgatggctggctctcacagagacaacaggaaaaattcaagtgaaaaactctcctgagagccaggagagacacaagggttaacagtcttgcggagtccttgtttaatgtacttaaacagcagattccttccagaagccacatggctgcttgtaacggttgagaaatccattagccagttattaatgacaagatctaaacccttccaagggagagagccaagaaatgcttttaataccctcttttctgaggtaatggcagcagagcctctctcagccatgggttctgtgcacagaatgatggtgtggtccttcaaaagcccgcagaagtgatttcatccccagactgagactccctagagacaccccaaatcacaccctcatcaaacacaagaaaatcacttctctctcccccttccaccatgacggttctagcctcccccaaggaggcagttctgttgacagtagcacagcccaattcagacccctgtccctgcaggtggcaggtcccctcccctcactgcagcccctagtgatatctgatctcaccagccatctgacaccacaccctgaaacctcagctgttggaaaggtcattcccctattcctggcttggccaagtttctgattgaactgtacaactgtgactgtcactacctctgcctctggcctcaaggagccaatcttctgtcacacagccatcctgggccacttcagccatttggcctgactccagcccatgcctaaggcagttgcgggtcatccctgtcccaggggaggacagcagtgcactggatagaccagttctcccttcttgtctctaaggacacgctgctcctattccccaaagagacagacattgtttcctccaggagctgagaagccctcttctttcttctttgcctaaagaaggcaaatgatatgcttagattcatccattcattcagcattcatttatatctcagacacctgctgagcatgagtccagtgctagctcagtggagaatatgggatgagctgcccctgccctggcagacccagagagaggctgatgctcctggcactgggaggcagagggctcaagagggattgcaggcaggactgtacatcccagctccattcccatcacttgcctctctgtctatgcctccatttcctttttttttttttttttttttttttttttgaggcagagtcttgttctgttgcccaggctggagtgcagtgggtcgatctcggcttactgcaacctctgcctcccaggctcaagcgattctcctgcttcaggcttctgagtagctaggattacaggtgcaccccaccacgcccagctaatttttgtgtttttagtagagaagaggtttcgccatgttggcccagctggtcctgaattcctgaccttaagtgatccgcccaccttggcctcccaagttgttgggattacaggcatgagccaccatgtctaaccatccattttctcttttgtaaagaagcccattactcaggattctggtaattaaaaaatataaggctgggcgcggtggctcacacctgtaatcccagcactttgggaggccgaggtgggcggatcacctgaggtcaggagttcgagaccagcctgactaacatggtgaaaccctgtctctactaaaaatacaaaaattagctgggtgtagtggcgggcgcctgtaatcccagctactcaggaggctgagacaggagaatcacttgaacccgggaggcagaggttgccccaagctgagatcccaccattgcactccagcctgggtgacagagcaagactccgtttgaaaaaacaaacaaacaaatagatctaattcttttgaaaacattaaaattgattgggcgcagtggcgcatgcctgtaatcccagcactttgggagaccaaggtgggtttagcccaggagtttgagactagcctgggcaacatgatgaaaccctgtctctacaaaaaaatacaaaaaatgaattagccaggcgtggtggcacgtgcctgtaatcccagctacttgggaggctgaggcaggagaatcgcttgaacccaggaggcggaggttgcagtgagccgagaccgcgccatggcactccagcctggcaacagagcgagactccgtctcaaaaaaaaaaaaaaaaaagtacaaaaaatgagccgagcacggtggttcatgcctgtaatcccagcactttgggaggccaaggcgggcagatacctgaggtcaggaattcaagaccagcctggtcaacatagcgaaaccctgtctctactaaaaatacaaaattagccaagtgtggtggcacatgcctgtaatcccacctacttgggaggctgaggcaggagaaccgcttgaatccagaggtggaagttgcagtgagtggagatcacgccattgtgctccagcctgggcaacaggagtgaaactccatctcggaaaaaaaaaaaaaaaaatggccgggcacagttgctcactcctttaatcttagcactttgggaggctgaggcaggtggatcatctgaggccaggagttccgagaccagcctgaccaacatggtgaaacccccatctctactacaaatacaaaaattagctgggtgtggtggctcacgcctgtagttcagctactcagaaggctgaggcagaactacttgaacccaggaggtggaggttgcagtgagccaagatcgcaccattgcactccaccctgggcaacagagtgagaccctgtctcaaaaaaaaaaaaaaaattaaaaataggtaaattgccattttcaaagatacctgtaaagatttttaaaatcattcatgaatgcggtctgttcgttgcacagagtagatgctcaaaaatggtgaatgagaccctctattttggtctcatgctgaagaagtccataaagcccacaagtcattttcatgatggacagaaaaatgtgtgtgctttctctgtctactgcctcaactgcacagaccccgggactgtagcagaaccatcttttgagcttgacaccgggaggcccaaattctagcacgggacccagggccagttgctctctggtcctcagtctcctcacccataaaatgggaaggagagaaccctgaatcattgcttctagcttctgaactcagttgttcagaacaaggactcactgctgatttttcaacagcacagggaattgcactgttcctgggaatgatggacagtaccctctgttccactgggcaagtgagatttcccaggcctctctgttcccttctccccttagagagcaacagacgtggccccatcccacctccctcaaccctctctctcctccctcaggactgggcacctcgctgcccccgctgctgcccactctgcgactgtgcctgtacgtgccagctccccgactgccagagcctcaactgtctctgcttcgagatcaagctccgatgaggacccagggcccctgccctctggggagcggccagcccccagggcccatgtgccctcctccctgaagagcctttccccacgccactggaaccacagatggcctgccgagcacccaggcctgggaactggaagtggcagcgcagggcctggctccctgcagggcaggactcttggccggctggacggcagctcctctggagggccagaaaagagaggggctagtgctcgggcaggtgccctggcttcccttcccctccacacgtcaacgattctatttgaagttgggcaggggggtggcgctgctcaccacacacaagtgttataggaggagtctggcccttgagtaccgggtacgcaggggtgcctcaaccacactccgtccacggactctccgttattttaggaggtgagtgtagtgccagtatctactctccttcttaaaaaaaaccagggctccagagaatcagaacagccaccatcaccgcagggagtcaagggaggagggagattagagaaggagccagggagggtggcagggaggccacgtgatccgagtcccctcacccctttccttcccacaggtccctggccaaagatttatttctcttgacaaccaagggcctccgtctggatttccaaggaagaatttcctctgaagcaccggtgagtgggcaggggctccctccccatcaatagggccgacccaagtcttcctcccccttcccccatgccgggccccacgatagtgtgaatgtcaggggcttcaggtttccctaaatataggtccctgccagaggatccgtggcgggaaaagggcaggggtcattagagaagatcggggacacatgtggggcgggcaggagctgccttataaccagcccgggaacccctagctcactcgctgctgaccaggctctgccggctccttcggcctcgccgcaggtgggccccttgcaggaccgggccggggtggggatggggttggggttgggccaacagggtccagatggggtccaggtgaggaggggagatttggacgataggagcagggggctcagcatctgggaggcagatcagttcggggacggattttcttttggagaaggaagtcaggctcaaggaagacgtttggcaggaactgtgaccccgcatgccagaggccgagcagcggccggtgcatagccgcgcattctggttttctgtggcgcagaggactaccagcctggctgcggcggcccggcggagagcgcgcacgcatgcgcgacccagcccggcctgccagcctggaactcggatggggaggtctcgcctccgcgcgccgctagttccgccgccttctcgcgctccctgcgtgtcctctcgatgccctttcctccgcctcccttacgcctgggccagtgacagggtgtcggctccgcgccgattcagcccgcgggcgaggcaggctaacgcacgactgcgcgatgtggcccctatggtgacacgcgctgcagccgcgaagaccggaagctggggcggccccgggccgcgcgcgctgggcctgggaggcgaaactcagcttccttcgtttccgacttttccatccgcgtcctccacttccccgttccgccctcccccattgccaacattctggctgagtcacggcgccccagagcgcgccaggctgggggaaaggagcagaagggagggccctagcgacccgcgggatgtggtccgagtcacgtccgaggggggtggggagggatcgtgttctcggcgcccgccccttcctagcgcggcctctgggctgcgcctctcgggggcggcccgtagcccagtccgtcgcctgccattggacgccgcccgctcctcgtaaaggaaaaagctcggcggagggcggagtggtgcctttaaaaggccgggcgccgccttccgcctgcccgcctcctgcgccgccccttccgaggctaaatcggctgcgttcctctcggaacgcgccgcagaaggggtcctggtgacgagtcccgcgttctctccttgaatccactcgccagcccgccgccctctgccgccgcaccctgcacacccgcccctctcctgtgccaggtgagcgcccctcttcacgtgcggggaccagggaccgtggagagggatcttgggggcagtggcgggttgggcgtccgcgtggaggcctcccccatcccatgccagcgtctccccactaccaggcacacacaggctccccggcccctccagcctgaggtcctctaactgcgcaatgcagcggctgcgcgcgctgagtcatggcgggggaggaagccggacgagatgaaggaccattctcccccttttcttgcagggacccctgtggcaaaggattagggccccttagccctggcggggatcctaagaggcagtgaggggtgggggccggcccatgtacagccccagggttctcgcaagtgggagcttggtttctgtcctgggaaacggggcgcccttcgcgaggagggaaacccctccgcggtgcttgatgcccccttaacactttccctgtctctccttatcgggcgaccttgattctgagcccggaacagctgcagccatgcgaagcgacgggagcatttttcaggggaaggcgcttgctcctccacgttcttgccccgtaggaacagtgacgatggcaaagcttaccgctttcctcgcctcgggctagggcttgttccgccgccctttcctgggcttctccttgctctcttatatttttcctaatgcccctttcctaccacccgccccctcccttgtggggaaaagcctgaccttgggatgtccttgaagccttggagcccgggccagccctgggatcttgaggggattggaaggaacaccccagtggcagtcagaagagctgggttctaatctcagatctggctccggggttgctgtgtggcttgaagcacagacctttcccatatctgggccctttcccacgagggtgttgggccctctgcttgattcacgatctttacattctaaaatactccggttcggttttgttttcaggcaaggtgaccccatggcaaggcgcaagccagaagggtccagcttcaacatgacccacctgtccatggctatggccttttcctttcccccagttgccagtgggcaactccaccctcagctgggcaacacccagcaccagacagagttaggaaaggtacaggggcaggcctagcaaagggaagttgggcgtaagagagagctggggaccagaagtgccccagggcctgctgggtgtggggcaggggaggtagggaacatttccctgacctccaggagaggggccctggtcatcgggagatgatgggaaaccctagctaactagtccttcccctctgtttcctgtatccaggaacttgctactaccagcaccatgccctaccaatatccagcactgaccccggagcagaagaaggagctgtctgacatcgctcaccgcatcgtggcacctggcaagggcatcctggctgcagatgagtccactggtgcgggcaggagacagaatgggtggagggtgcagggttgggagtggcaggctgatcccctaattcccatgtgacactcccagggagcattgccaagcggctgcagtccattggcaccgagaacaccgaggagaaccggcgcttctaccgccagctgctgctgacagctgacgaccgcgtgaacccctgcattgggggtgtcatcctcttccatgagacactctaccagaaggcggatgatgggcgtcccttcccccaagttatcaaatccaagggcggtgttgtgggcatcaaggtaaggggagggcctccggacgtgaggtttgagatggaagtggaggaaggaaatccaggttagtgaggcagggaatgaatgctggattggtggcctagagacttgcatggagcctgcttcaggcttagggcatttactcgacatttttaatcctcacaattctgagagaacagtatcattcccactttacacatgaaaatctcagaagctcagggaagtgaagtgttttgctcagagtaagtggcagagccccagtctgacacccaattcactcaacatttctgttgtcaaataacatcccagtgtatcctgtctcagaggattgttactaagtgaactaagtgaaaatattttaatttaattgtaactaagtatttgagtaactaaacattttaagtaaattttttttttttttttttttgagatggagtctcgctgtctcccaggctggagtgcagtggtgcgatctcttggctcactgcaagttccgcctcccaggttcacgccattctcctgcctcagcctcccgagtagctgggactacaggcgcccgccaccacccggctaattttttttgtatttttagtagacactgggtttcaccatgttagccaggatggtctcgatctcctgatctcgtgatctgcccacctcggcctcccaaagtgctgggattacaggcgtgagccaccatgcccggcttaagtaactaaatattttaattgtaactaagtgaaaatatttgccagccctgagatgcagtttaagggattaagtaaatgtgggggaagactggggctaaagaagaggaaagaggggcacgcccagctacctaggaggctgaggcgggaggatcacttgagtccaggaagtggaggcttcagtgagctgagattccaccactgtactccagccggggcgacagtggaaagggtgctagaggtcatttcctgtgtcttaatgttgttaccctgaccccaacaggtagacaagggcgtggtccccctggcagggacaaatggcgagactaccacccaaggtgagaactgtttgattctctgccctacgaacccaaccagagcaggtttgggtgctgggaggagtggaaaccacatgcccctccccaccgtgctctgaccccttcctcttctcttagggttggatgggctgtctgagcgctgtgcccagtacaagaaggacggagctgacttcgccaagtggcgttgtgtgctgaagattggggaacacaccccctcagccctcgccatcatggaaaatgccaatgttctggcccgttatgccagtatctgccagcaggtgggcctgcaggtcctcaataggcaacctcctacctcatttggttccagtgttgttaatttgcctattacctgccatgatgcctacctccccaaaagcaagcattagctttggcccgtggaggacactcaagggctgttgaaggcagaggggccaaggagggatggtgggtggatctgaggcggctcttgtctcctgtaatctgagggctttgaagcctgagtccctggcatcatcaagatacggtcttgaccagtggctgtggagagatgtaggtgggactctgggttaggaggcctcacagtgaccctgtccctcgccctgcagaatggcattgtgcccatcgtggagcctgagatcctccctgatggggaccatgacttgaagcgctgccagtatgtgaccgagaaggtaaatggctacctgcctgaccagtgcaaggtggctggccggggaccctggggctaacccctatcctctcctccaccccactacccaccgtgcgcctgctctgctccaggtgctggctgctgtctacaaggctctgagtgaccaccacatctacctggaaggcaccttgctgaagcccaacatggtcaccccaggccatgcttgcactcagaagttttctcatgaggagattgccatggcgaccgtcacagcgctgcgccgcacagtgccccccgctgtcactggtgaggcccacactcatcttgatctctatgcagtagataagctccacccacaaccctatgcccatttggacggatttccatggcaacttccaccagctcctgccagcttcctgggtctctgaccacagcccctctcgcctcacccctgctctacagggatcaccttcctgtctggaggccagagtgaggaggaggcgtccatcaacctcaatgccattaacaagtgccccctgctgaagccctgggccctgaccttctcctacggccgagccctgcaggcctctgccctgaaggcctggggcgggaagaaggagaacctgaaggctgcgcaggaggagtatgtcaagcgagccctggtaaggataggcaggaggtgggcagggtgcctgggtggatgggactcggagaagagcccttctcactccacccctctccctgcttaggccaacagccttgcctgtcaaggaaagtacactccgagcggtcaggctggggctgctgccagcgagtccctcttcgtctctaaccacgcctattaagcggaggtgttcccaggctgcccccaacactccaggccctgccccctcccactcttgaagaggaggccgcctcctcggggctccaggctggcttgcccgcgctctttcttccctcgtgacagtggtgtgtggtgtcgtctgtgaatgctaagtccatcaccctttccggcacactgccaaataaacagctatttaagggggagtcggccgtccgtgtcttgtggtgtctaatgcaggggagggcctggggaggtagcagagcccagaagaagaaagagcccctgttctctgttttttctgggcagaaaaggagtgaaaggtggaaggaccttcctgctctgttttatacttggccagggcttcaagaaaggctgagagcttgtgacattttcttccagccactgcaggctctgccccttcacctaacagcataagatagggctaacagttggggagtatggttgtaactgctcatgtcttaggaggcttcagcctcagcacttttaggtccagaactcaaggggggcagaagacccctgtgacaaaaacccactaactagctcatgagtgacatgagccaggcaacataatgggtgttttatatgagtagatgctgttatttttaatttatacctaaggctcttttgcccaagattgaactgtttcttggtggaaaggattatcaatgcatatctcttttttttttttttttgagacaatctcactctgtcacccagactggagtacagtggcacgatcttggctcactgcaacctctgcctcctgggctcaagcgattgtcctgcctcagcctcccaagtagctgggattacaggctcacgccactatcgcctggctaatctttgtgttttttagtagaggtggagtttcatcacattggccaggctagtctccaactcctgacctcacatggttcctccacctcagcctcccatagtgctgagatgataggcgtgagccactgcgcccagccaatgcttatctccttaatctacactattgagttttctgttttcccatctttttttttttttctttttgagacagtttcgctcttgttgcccaggatggagtgcaatggcacggtctctgctcactgcaacctccccctcccgggttcaagtgattctcctgcctcagcctccacagtagctgggattacaggcgcaagccaccacacccggctaattttttatttttagtagagacgaggtttcgccatgttggccaggctggtctcgaactcctgacctcaggtaatccgcctgcctcagcctcccaaagtgctgggatgataggcgtgactgcgcctggcctgttttcccattttaacaggagatggaattagagagggcttcttagtctcctttgggctgtggaatcccataaaaaccttgaattgtttccaatacccccttggtaatgcagatacagaagttaagctgtagagctcaggctccaggtgaagaactgtgtctctgtagctgctgctttccatgaagctagaatgagcgtgccatgccattactttgagcctttccccaatgacccaggctggggtgtacagtaactacatcagctctctggacctagagaatctctgcagtgattcaggtagaacggagttacctagaaccttctaggagtataaaaacttggtcctaggccgggtgcggtggctgacgcctataatcccatcattttgggagaccaaggtgggcggatcatgaggtcaggagtttgagaccagcctggacaacatagtgaaaccttgtgtctactaaaaatacaaaaattagccgggcatagtggcgcacacctgtagtttcaactacttgggaggcggaggcaggagaattgcttgaacccaggaggcagaggtaatggtgagccgagattgtgccactgcactccagcctaggcaacagagccagactccgtcccaaaaaataaaaataaaacttggtccttcccttttctgcttattttgcttttattgcttacatctaaaacaaaaccaatcactattatccctctaaactttggattaatttgtctgcctagctcattcaactctgggaaacaaacactgaagtaaagcaaataaaaattgaaggtcggtagaagatggcaaagggggcattccaaaagggaacatgtgcagagtctcagagactggagagattgtttaaagatcaatagtttcagccgggcacggtggctcacaactgtaatcctagcactttgggaggctaagtccggcggatcacgaggtcaggagttcaagaccagcctagccaatgtggtgaaacccccgtctccactaataatacaaaaattagctgggcatggtggcgcgcgcctgtagtcccagctactcgggagactgaggcaagaagagtcgcttgaatctaggaggtggaggttgcgctgagccaagattgtgccaccacactccatcctgggcaacagagcgagactccgtctcaaaaaaaaaaaaataaaaaagactagagaagcagagaacgtcatataccagtttgggggatttggacttttatttatttatttattttgagacgaagtctcgctctgtagcccaggccggagggcagtggcacgatctgggctcactgcaacctctgcctcccgggttcaaaccgattatcctgcctcagcctctccagagtagctgggattacaggtgcacgctactgcacccggctaattttttgtatttttagtagagacggggtttcaccatgttggccaggctggtcttgaacccccaatctcaggtaatccgcctgccttggcctcccaaagtgctaagattacaggcgtgagccaccatgcctggcctggacctcttaattttatgataatctgagttcccgaaagagtaattgatagaaaaaaaaactacacctgaggacacaactttctgagttcaaatttctttttttttgagacagcatttcactctgttgtccaagctggagtgcggtgtcacaatttcggctcactgcaacccccgcctcctgggttcaagcgattctcctgcctcagcctcccaggtagctgggactacaagcgcatcaccaaacctaattattattattttttattttttaggatagacagggtttcaccatgttggtcaggctgatcttgaattcctgacctcaggtgatccacctgcctcggctgcccaaagtgctgggattacaggtgtgagccaccacacacagccaggttcaaatttctttcttttttttttttgagacagagtctcgctctgttgcccaggctggagtccagtgacgcaatcttggctcgctgcacgctctgcctcctgggttcacgccattctcctgcctcagcctcccaagtagctgggactacaggcgcccgccaccacgcccagctatttttttgtatttttagtagagacggggtttcactatgttagccaggatggtctcgatctcctgatctcgtgatccgcccgcctcagcctcccaaagtgctgggattacaggcgtcagccaccgcgcccagcccaagtttcttattctttttgtttatagactgggtctcactctgttgcccagcctggtcttgaactcctgggcttaagtgattcgcctcggcctcccaaagtgctgggattacatgcttgagccaccacacctagccccggattcaaatttcagtgtaacatccccaatccactgttatacaagcaatgaacaagttatttaacccctctgagccagtttcctcctcttaaaaaaggcacaaaacttaatagaaagcaactaagaagccaggcacggtggctcaagctggtaatcccagcactttccgaggccgaggagagtggatcacctgaggtcaggagttcgagaccagcctgaccaaaatggtgaaaccccgtctctattaaaaatgcaaaaattagctgggcgtggtgacgggtgcttgtaatcccagctactcaggtggctgaggcaggagaattgcttgaacccaggaggcggaggttgcggtttgccaaaatcgctccactgcactcccgcctgggcgacaagagcaaggaaggctctgtcttaaaaaaataaataaatgaaaatacaaaaattagccaggcgtcgtggcacatgcctgtaatcccagctacttgggaggctgaggcaggagaatcgcttgaacctgggaggcggaggttgcagtgagccgagattgtgccactgcactccagtcggggtgaaaaagcaagactccgtctcaaaaaaaaaaaaaaaaaaaaaaaaagaggccgggcacggtggtacacgcctgtggtacagcactttgggaggctgaggcaggtggatcatgaggtcaggagatcgagaccatcctggctaacacggtgaaaccccgtctccactaaaaaatacaaaaaaattagccgggcctggtggcgggcgcctgtagtcccagctattcaggaggcagaggcaagagaatggcgtgaacccgggaggcggagcttgcagtgagccgagatggcgccactggactgcagcctgggcgacagagcgagagagtgagactctgtctcaaaaagaaaaacggaagcaactaagaaatgtcaagagtgccattttggaatcagagaagtcatgctgactgaggcacaggcttggcgtgggaaaagtggactccaatctgttaacttctgaagttgtccacggcaaatatttctctgacggcacaggaagagatctgaacttggcttccctcatccattgaacaagtattaacaagtatctatatatgcctaccgtgccaggccttattctaaccactggggctgcaatatttaaaaagacaaagttggatcctccaaggactgtggtggggaaggctgacaaaacaagtaacaaaaatgtgtaacattaaaaaaaaagtgtaatgttaaaaaaaaaaagtgtaataaagttacaaagcctagccccagctcggcttgtttccctagctgaaatgggggatggccgggcgcggtggctcacgcctgtaatcccagcactttgggaggcccgaggcgggaagatagcttgtgcccaggagttcgaggtcacagtgacctatgatagccccaccgactccagcctgagcgatagagcgagaccctgtctctaatttagaaaaaagaaagttgtggccgggcgcggtggctcacgcctgtaatcccagcactttgggaggccgaagggtggtggtgggtgggggcgcggatcacctgaggtagggagttagagaccagcctgaccaacatggagaaaccccgtctctattaaaaatacaaaattagcccagcgtggtagcgcatgcctgtaatcccagctactcaggaggctgaggcaggagaattgctggaacccgggaggcggaagttgcggtgagccgagttcgtgccattgcaccccggcctgggcaacagcaaaactccgtctcaaaaaaagaaaagacagttgtttaaacatttttatgaaatgatatgggaggggactggtctagggtttctaatagcctccacatcgcccagcggcagagcccacaaaactgccactggccgccaccgggttcctccacctccttcccgatctcaggctggagaagtggtgcaggggtcgctgcgaaaggagaggagcgtgtatgacgccacatccggcgcgcggcggaactggcctcctttgcttccgcggcggggccggaagtaggagcggcggcggcggcggcggcggcggtcgaaagcggagtgaaagagggaggcagggagccggagagccggaaccggagtcgcagcggcggtaatagtgcgagactcctctaagtcaccgtccttagcgcgggaccgcggggttcgacgggagttagcgggggtgcggccaggccgttggacgccggggggtcctggggccgatgtgaggggaggcgggggtgggggagccgggccggctctagaatcgagttgtccgctccgagccccggacggacactgatccgcgggctcgtcttggcctttcccaggagacccctgtgcggtgcggagggggcggcggccccgactctgacccgcgccgggggtgggccatggcggagatcagcgacctggaccggcagatcgagcagctgcgtcgctgcgagctcatcaaggagagcgaagtcaaggccctgtgcgctaaggccaggtgagctcgttggccctggggaagggaggccaagccgccgcccacgggttctggcctggggcaaacccaactgagaactttgggcttgcctcgttctggaagctttcccagagaggagcaggatggagccgctgccctcgaggaaaagctagcctgctcggggaagacagagtggataaagacacttaaagtttattagacgatgtgtttccagtggagtaagagtgttacataaagtacttaggaaactcaaggaaacaagtccatctgtcgggggacggaagcttgttggaggggggccgaactgtgggagaggcctcgaataaggaggtggtaaaagagtcagccaaaaaccaaaagtttaagacaggaaagttaaagaccctgtgatttataaaagtcttctaattacaacaacccttaaagattggtggtattgtactcattttacaggtgggaactttcatgttcaaagttacccacaagtaaggaatggggtctgaagccagctcttagtgtcctgtcctttttcaggccataatgcaaaaaggtggagttggatcattcacgttcagggtgggagcctgagaaatcgtagcaagtaagccagggtagaattaagcacgatagggaggccagttcagagttctgtgggaagtaggatgatgtagtggttaaggctctaggttttgcagtgtgagatggctctaggtttgaatctgaactctgccgctttctagctgtgttagtaatcttaagtgtctttatttgtaaagcagaattaatagtacttaataagatgattgtgaagattcagtgagttggtgctggagatgaggttagcacagtgttttggtacagcatacgtgcttgataatcaccaggtattctatttcttttggaagagggcaataatgagatgggctaaagccatcagggagggcttttgagtggaggtaggccttgaaggatgaagataatttggctagctgatggaggcagggccagtgagggaagggcattccaagcaggacgaatgtaacagtggaggccctgagatgcgtggggaacagtcaggggtttaattacctgcctcctctggggaactgtgtgattgtggcttctaccaggctggagaattgtggcagaagagcccacagaattaccctacgtttattgaacagtaaacattggcctttacagggccactatttggcctggcccggtactggcaaaaaacttctatccatctcttccccccagcaatcctatgaggttggaatcatttgctgcattttatcgaataggaagccatgactcgtagaggtctggtgacttaactgaggtcacccactgaggacgtggcagagctgggtcctgaatctgtggccctcaggctctttgcctggccctgcctcacatagactacctgcagccagacagggcctgtgaggggatgatgagcagggtcggcctctttttcgccacctgtctgtggcttttctcttttgccagctgaccagaccagccccatggtgtttttagttgtcccctttccctcagtcctgattggcatttttaggaacttaaacctgttgttgcctggcactattctttaacctcgaagtattgtctccctcacgggccctggatcagtgtggtggtgatggtagacaaagcttagatagcatgctggagtttgcagaatagcaggaagtcgtatattcagtctccatggctccttgcaacagcctaaggaatacgcagggtgggctgagtacttagccccatttcatagcagaggaaactgagcctttgagtagataatgtcttgcccaacatcacgcagctagtcggaggggaagttagttttgcatccaggtctttgactgtgctccgtggtcactgagagccaggcagaggcatttagattttgatgtggggtgtgaggcagcaggaagccatggaaggctgaggggtggagggtcctgcccagttgaaactgagtggaactaggaggtactaggccaaggcctgagttggccgctgttgtcccaggctcagtctgaagcagggccatctctgatacctggttatggcctcctggggacccatcagagacccaggctgaggctggtggtgtcaagagcaccagcttgcctagagggcacagacatgcagatgaaaccagtggaagcacagaggtccgcagtgtctgagctgaaattgctgctactagaaatattagcacagtaggagagctgagcttttgaatcaggtggtcttcagtatgaatctttgccttgtcacctagaagcaatatgaccctcgtcaagtcactttctgattttttgaagtgataatgacatgcagttgagagtccgggtatccgggcacagggcctgctgcgctggtagccgttactgcaggcaggtcctgatagggctggggaagtgctgcaagtggcagaactggggctggaatctgggcctgattcccaggccacactggggttgcgctggcactgaggggggctttgcagagagcacgggccctgcatgtgacctccctgggcttcaggttttcactcagggtctgtggaaggggctggcataaattctcaggaaattgggcttctgggttccaatttagccactctccagcttggtgaccttgaccctcccgcttttctgtaagctttggtttctttttttctttttttttttttttgagacagagttttgctgttgttgcccaggctggagtgccagtggcctgatcttggctcactgcaacctccacctcctaggttcaagtgattctcctacctcagcctcccaagtagctgggattacaggcacgcgccaccatgcccagctaatttttgtatatttactagagacggggtttcaccatgttggccaggatggtctcaatctcttgacctcatgatctgcctgccttggcttcccaaagtgctgggattacaggcatgagccaccgcgcccggcctagcttcggtttctttactgttacgtgaggctgaagagaacctccccagtctgttggaaaggtcactatgagcagttgatggggaaggatgttcagcacaagaagcagtgcaggtgggagagtccgggtactgatgtggcctcttggaccaccgccagtgctgccttctgttcccagaaagccagggcagacctccttcgtgctgcctctgccatacagagcaaggggcataagtgaatcctcctgtccactgagctcaggaaactcattctaagggaagagattggcagaaagaggggggccaggcgagttgggcctcccacatcagaatatcttgataaagagtcagaccccagagccaggcttccctggttcatatcccacctgtgtcactggcaccaagccagcctccttccctgcttcaatttcttcatctgtgtaccgggaatcatcatagtacctgcctgccaagctcttaataacatttgtggcacacagtatgagctcgaatgttcactgctgctattaccaggcaaaatttggaaatacagtgttgcttaaattgggtatctataggctgggtgcagtggctcacatctgtaatcccagcactttgggaggcaaaggtgggtagatcacttgaggtcaggagttcgagaccagcctgggcaacatagtgaaatctcgactctactaaaaatacaaaaattagctgggcgtggtggtacatgcttctaatcccagctactcgggaggttgaggcaggagaatcacttgacccaggaagcagaggtttgcagtgagcaaagatggcgccactgcactccagactgggcaatggagccagactctgtctcaaaaaaaaaaaaaaaaaaaaaaaattgggtgtcttacctggcaaagtgatttcatctcctgctcactcaagtagaagtagactgcactgcaaggagaaataaaaaatatttaagtcctcatagtcataaagaaatactgaacacatggcaagagcacctcacttttttttttttttttttgagatgaagtcttgctctgtcgcccaggctggagtgcagtggcgcgatcttagctcactgcagcccccacctcccaggttcaagcgattctcctgcctcagcctcccaagtagctgggattacaggcacgcgccaccacgcctggctaatttttgtatatttagtagagacagggtttcaccatgttagtcaggctggtctcaaactcctgacctcgtgatctgcccaccctggcatcccaaagtgctgggattacaggcatgagccaccgcacctggccaagagcgcatcactttgaaggcgcatccactgtgggcctgccctgggcacctacccttgtgtctggatagcctgggagaagggctctgtgattggccaagggtgacttaagctctgctgtggagaggatggggagacccgcctcccaggagtgagtcctggatgcggaagagggagcggcagggggagtcagggctggaaaagtcccagcctgctcagaaggcctggaacgctgggataagaggttggactttgtccttttggcagcagggggccacggaagggtgttgcatgctgaagggccgtggtcagcctgttttggggagactgtacgcttcactcctgccccctggagcttccaggactgcctcatatcctcccctccccccaaaaaaggtcaggaattgggctgggctggcctggctgtggtgaccctggtcttctcctgtctccagagagatcttggtagaggagagcaacgtgcagagggtggactcgccagtcacagtgagtacctgctgtccctgcagagccaggcctggtctttcaggcacatgaagtttcctcttcatcttgggggctctataagcccaaccctaagctcttttatctgtcctttccctcaccttcaacggagcactgctaaaagaagtgggggttgctgtgcacgttggctcacacctgtgatcccagcattttgggagggcaaggtgggcacatcacttgaggttaggagttcgagaccagcctggccaacatggtgaaaccgtttctactaaaaatacaaaaattagccacgcgtggtggcacgtgcctgtaatcccagctacttgggaggctgaggcaggagaatcgcttgaaccccagagttggagattgcagtgagctgagatcaggccactgcactccagcctgggtgacagagggagactccgtctcaaaaaaaaacaaaaaaaaacaaaaaaaacaggccgggcgcggcggctcacgcctgtaatcccagcactttgggaggccgaggcaggtggatcatgaggtcaggagatcgagaccatcctggctaacatggtgaaaccccatctctactaaaaatacaaaaaaattagccaggtgtggtggtggacacctgtagtcccagctactcgggaggctgaggcaggagaatgacgtgaacccaggaggcggagcttgcagtgagccgagatcgcgccaccgcactccaggctaggcgacagagtgagactccgtctaaaaaaaaaaaaaagaaaggaaagaaaagaaaggggttatgggaagggactttggatttgttagtggagattcttggccagggcagaaggactcctatttggcgagtgattctgctcacatatctccagggctctgtgttagtaacttgattctgggtactttgtggggagtagagagaggaaggggccgggacatctacctggaaggacttagttctagctcttgcctacagaatagttggtactcagcataggacagtgggtatggttccagaccagactgacttggggtgggagaggagaattttggtcctaggaagtagaagtgcagccaagagtgataaagctcactaaagcagcgggtgtttggagggtagtccctggcaactcccactgcttgagttccaaccccactcttcctgttccccaggtgtgcggcgacatccatggacaattctatgacctcaaagagctgttcagagtaagagtgtggccaacactgtgaaatgtaacggggggatgactggaagacccctgtaattgagggtgggagccttaatttggggcgtggagtgggggcaaggggccccaagttagatgggtggttgtggaagaagggcctccgctggacagaaacaggtagggggtaggggactgtttacgacagggcaaaactttctacttccccacaggtaggtggcgacgtccctgagaccaactacctcttcatgggggactttgtggaccgtggcttctatagcgtcgaaacgttcctcctgctgctggcacttaaggtggcagtccccggcttctgcacccccaacctgggcgacctcgggccgggcctgtcttagtccgttccgccctcatctcctatcgtgaccagccccaccttggagctgtgtcactggtgatggaccgattctgcttttgggggtggtcagagacttgatgggggttgaggccagcggggcagcattctgggaggggcagaggctcactgttgcgaatgtggcaggtcattgatgccactggtgggagaggcagtgtggggccagatgacaaagggcctgggtgccttgctagggacccggtctgtgtctggtaggtgaaagaagagccattaggttcatagttgagggaatgggtcagctttacattctctggaggggtcgtgtgggcctgggaggtggctgatgccacacgattcaggcaagaggtgccaggagtgtgctgggcagtggttgtgaggatggcaggctggcgggcacgaggaggtcagagagggatgtgtggagagaccgtctaggcgccagccctggcttggtggccacccccaggttcgctatcctgatcgcatcacactgatccggggcaaccatgagagtcgccagatcacgcaggtctatggcttctacgatgagtgcctgcgcaagtacggctcggtgactgtgtggcgctactgcactgagatctttgactacctcagcctgtcagccatcatcgatggcaaggtaagccagcccagggctccatgggacagggagaggaggggggcttcaggcctcagccccgtcctctttccctgctctcccctgtagatcttctgcgtgcacgggggcctctccccctccatccagaccctggatcagattcggacaatcgaccgaaagcaagaggtgcctcatgatgggcccatgtgtgacctcctctggtctgacccagaaggtgagggcatgtgggcaggggcaggcagggacagccaggaggggttgggaaagagagggagcagggctggtcttcactgtcactcgtcctccacctgccaaatggctggaaccctggaggaggagcagggaggcctgcatggcaggtgctttgagcacacagtggcttggggcatggcccagagggctgtggaggacaaccaagtcatggctccctgaagtgaaggggccttagaacatgacagcagcttcttcagaggtcagaaccccagaatggtagccccctgagacccctcattttgtgggttttccactagtgtagagcagagctgagatttaaagtcaggtcttctgaggaccagccagagttcctgttgtcacaggcacacacgcacaggcagcctctgctccagcgcagacacacacacacatacacatagcctctgctccatcacagccacacacacgcacacgaggcctctgctccatcacagccacacacatacagacacacacatgcagacacacacatgcagccgctgctccacagtcactccggacctccctgtgacaacacagggtgcccttctgtctctgggagtgcccctttcactcttatgtgctgtttggacggggattgtatgatcactgtgattatgagggggccccaggcattgggcgttctttctcctctggagcttatctgcccctacatttgctgtcctggtccccgccatcccacagaccatattcaggccccatgctctggtcccacgggcctctggtggacttggggaggggccaggctgctcaccctcaaggggcagcgctggcagccagagaagcctgaggacatccctctccatccctccctttccgcatcagacaccacaggctggggcgtgagcccccgaggagccggctacctatttggcagtgacgtggtggcccagttcaacgcagccaatgacattgacatgatctgccgtgcccaccaactggtgatggaaggttacaagtggcacttcaatgagacggtgctcactgtgtggtcggcacccaactactgctaccggtgagccggctgggccgggctgggatgggcgggcatctgagccgagctgctcctgaccctgctgccccgccttccagctgtgggaatgtggcagccatcttggagctggacgagcatctccagaaagatttcatcatctttgaggctgctccccaagagacacggggcatcccctccaagaagcccgtggccgactacttcctgtgaccccgcccggcccctgccccctccaacccttctggccctcgcaccactgtgactctgccatcttcctcagacggaggctgggcgtggggggggctgtcctggctctgctgtcccccaagagggtgcttcgagggtgaggacttctctggagaggcctggagacctagctccatgttcctcctcctctctccccacttgaaccatgaagtttccaataatttttttttctttttttccttcttttttctgtttgtttttagataaaaattttgagaaaaaaaatgaaaaaattctaataaaagaagaaaaatggtttttgggtttgtgccagacttggttgggaatgcacagggttgctggcctgggacctggggtggacgtcagggccttgactgcctcagggccccgacctgccaagagggccaggctcaggccagtcagcttgcccagggcctccaggggccgctgcctgctggcttccccagccctagggagagggctctgttctcatgggcagccttatcttattaacagcatacacacacaggcacacacagaatcacaggattctgatttctccattttcctgaagaggagatgggcctagagggccagtggattttgtgctaggtcaggcagctggaaacacaggtctagatctgggcctgggtctcctagcaaagcctttgctcacccagccccgcccagggccaaacacaggagcccaatgtttcctgagcatggatggcttttgagttttattaacaaaaatactctggtcccagaacaacagactggtgtggcctgcaccagtgtgtgtgggggggtggggattgagcccctccagagcccatggggaggcctggtaagtggggatgctggtctgtggccccatttggccaggcagagccccttccattcacacggaggtgagagccgggaaggggaagccggccccagctggactcccagcagccttggttaggctttgaagccagaggggggtgggagtgaaatcaaggtgtgaagttgagggggtgggtgggcaggcccaaggcggccatttggtgtgggggatggggccggtggaggtgagggggctccagggctgggggaagggagcgggaggtttgtgatggaggcagaggggcccagcagtggttcagtacatgggtttggagcccacatccagatagcccccaggcgcggtgtatggtagagggaaggggcccccttggagaaagtgcggggcaaagggtaccgccggtggagccgctgggtacccggagccccctgacccgtgcggcagctccagaaatgcagccgagtagggggctgagcgcccggagtctggagcctccgggaagctggggctcctgacatggagagagggatgtcagagcagggcagagggacccgcagccccgcctggtcccctgtcccactcacctggtgggaaggtgactgggggccccatggaaagccgcagggtgcaggaggtaggcctcagcactggggccaccacacagaggtgccggggcagcggtggcttccccgggggctggggcctgttctggatctgattcacgaatgtctccacccagggtggagtcgcagggaccacctggtgtgtctggggagagggaagggagaggttgggctagggaggatccctgtctcaggcctggccccatcgccatcgggactacactcacctccgctcccataggcctctgtggctgctggctctgggccccgcagtttcctcttcacacgggcgtctcgctccctggggaacagtggtggtgatgatgatgatgatggtgatggccatggtgatggtaacagtacttacccggtgccaggcatttcaccctcccagggaccctgtcaggtaggggccatcattatacccattttatagatgaagaaactgaaggccagaaaattaaataactagaaagtggcagagctggaattttgtccctgctcaaatttgtccatgctttcctattgtgtttagtatcagtggaaactccttcccagtggcaaggccagggcacagtctcacctagctcatctttctgccccatctccactctcagcctctctctggaatcctcttctgtcccctcttcacgggctgaacctgtcctttttcttttcatttttaaaatttgagatggggtcttgctatgttgcccaggctggagtgcagtggcacagtcacaggtcacagctcactgcagcctccaactcctgggctcaagtgatctttccatctcagcctccgaaagtgctgggactacaggcatgagccaccaaacctatccttgcctcactgcaagcgcaagttcctcaaggaagtcctccctgacctccgagagcacacacccctccctcataacatccgtcacagttctgcttttgcatttgatggagtgactccttggttcatgtctgtctcttctgacaaactggaagctacttgagggcaggggccagctctgaggtgctgcacttggaacagttcccacggccttacggaacctttactgtccgacataacctggcttcccctcccctgcctgactcttagtcactccactgcagccacgccacaggcacagccccacctcagggcctttgcacgtgctgttcccactccctagtgtgctttgccagatgcccacctggctccctcccgtacttccttcagctctttctcaagtgtcttcttcccactgaggcctttccaggcctcttatctaatacctcaccccagtccttcctatcttttcctggtttatttctcttctcctttttcttttttttctttttttttttttttttgagacagagttttcttttctttctttttttttttttttttgagaggaagttttgctcgtgttgcctaggctggaatgcaatggcatgatctcgactcactgcaacctccacctcctgggttcaagagattctcctgcctcagcctcccaagtagttgggattacaggcgtttgccaccatgcctggctaatttttgtatttttagcagagacagggtttcaccatgttggcaggctggtctcgaactcctggcctcaggtgatctgcccgcctcagcctcccagagtgctgggattacatgcgtgagccaccacacctggtctctcttctctttagaatggcttcctaacagatgacattttatttatttctcttgtctgcttgtctactctccccactagaaatcagctgcatgagggccggggctttggtttgctttgtttgttttatctccagtgcctggaactgtccctggcacatagcaggtactatataagtatttgctgagtcagtgaatgaatgttttcacttaccactgcatttctgatgtccagcacggtgcctggcacacagtgagtgattaataaacatttgttgaatgcatgaacaaatgaatgaacaactcccacctcttacagtttctgccgttctcccggaagcctttggcaaagggattggctgcaatcttcagttgtgtgatctggggacacacatgcagggtcaaagcaactgcggtctgggcagggggccaccaccccctcaagcagggtcactcacctgtgggttctggtaggctgtcacggagatgaatgtggtctcggggaagcggaaggaggccatgcccccccagtgctggctgcagagctgggctgcccgaactaggtgtatgcggggttggtacttgtgcatggagtgcaggatcagctgggagggaggaaatgggagtgattccctgccctgcgcctcacccttggcctcccttccagcaccccccaaccctatcctggagtcccagcctgggcctcacgtggccgtgggggtccagcgtgctgttggtgagcttgacacgatggaaagacacaggctgccgcatccaatgtgcaccagtggcaggagagtcggggtgaatgtagacacggtcaggcaggcggggctctgccttgccgctgggctcccagcgccggccctgccagcggtagcgagccccatccaccggaatcacatccagaagaaacaagtagcgggcctcggggtccaggccagtgactgacactcggcaggcagggaacatgcgcctgtgcaagggaggggacaggagaggcctggagctacccactggccaggggtgggcccagcaccagtaacgggacataacaacgggctccccagagctgtcagagaaacatcaaaggaggtggaattagaacccagagggcaggctggaggctgtggctcacacctctaatccctatactttgggaggccaaggtgggaggatctcttgagtcaggaattcaagaccagcctgggcaacatagaaagaccccatctctacaaaaaaattaaaaaattagccaggcatggtggtgcacactgatagtcccagttactacagaggctgaggcgggagggtcacttgagcctgggaagtcaagactacagtgagccacaattgcaccactgcactccagcctgggcaacagggcaagacactgtctctgaaaaatgaaaaagggccaggcgcagtggctcatgcctgtaatctcagcactttaggaagccgaggtggaaggatcatgaggtcagaagtttgagaccagcctggccaatatggtgaaacaccgtctctactaaaactacaaaaattagccgggtgtggtggtgtgtgcctatagtcccagctactcgggaggctgaggcaggagaatcgcttgaatccaggaagcagaggttgcggtgagctgacgagatcgtgccactacactctagcctgggcaacagagcgagactccatctcaaaaaaaaaaaaaaaaaaaaaaagaagccagagggcggaatcttagagctggaaggttttcttgtctcattttacatttggggaaacaggacagacgggttaagtgatctgtcacacagcaggttaggaacagagccatgactcctacccctcaaagcctatttgcagaagcaggggtgactaactttcttgctaggagcttcctgtccccaccctcctctcctcccctgatctccagcaccagaatctgcagctcttagatgaatttgctttagaaaaaatataccctgcctgcagtagggccgaggactttccatgctagggcttgagttcctgccccagctaaagacctcatctaaggtcaaacactgaccgtgtccctgcctctagggtgaccctggacctagtcatatactgactcctattcgagttgcatactgatcccgaatcctggccagatttccctgatgctggtcaatgggctggcccttgaccccctgtccttgtctggatgctggtctaagccacacactaacctataacccagagggacttcctgaccctgccccagactgacccatgacccttgccatagattggtccctaaactcagccacagactccacagactggcccttaacccttgtcacagagtgactcctgattcctgccacagagtaacccttgccccaggccatagtcagattctaggcctaggcagagctctagcccctcgggaaccacccagtcctagccccctccccagggactctgcctttcccaagagacccccaccagaaacacggaccctggccagcccctcacctcccagctttggtgatgatcatttctgttcccacagagctgaactccttccatagctcccggttctccaggctcaggctgacccccgggagggaatggagggcctctggagctgatggggccggctcagtgcccatggcagggggcagaaggggcagaggtgggtgcgcggccagggtgcggggagcagcctccatcccggagaggaagcaatccagtttaggggtgtccagttctggaagccggggaagaatgaggagccagccgagggccacagcccccctattctcctacccaggagctggtcccaacgctcaccggggtagcggtagccctccgctagggcgggtgggaagctggagtcggccccaggttgggcgggccccaggcggtagccggcccccagggacgggtacaattctcgtggatggtacatgttgtagttccgtctggcctcaggtctcgctgcttagggcccccggtgctgcgagatgccccctttatagctcacagctcagccccttccagatccaggatcacagcccctcccctctttggggccctggagttgggctggggtggagacccctggggcctcgaaggggtccgagagggggtcggatacctgggtacggtcccctcctcccctccctccccaccccgggaggcttcattagcctcgaccccctgccccctcattacataattaactcctcggcttgattgatccccagggctcggacagggacgcagtttggcgcttccggccagctggtccccgttcccacggtggggagccccggctagggataagctggggggcggggcctggaacctggacggagccaagagtcccgggacacaccttggcgccccagaccttctggcaggtgaccgccctccgccccccttcacttggaggccgggccctggagggaagcagcgtgaacagagggaaagtgcaggctagagggacgcggcctgagctgatttcacagggcactcggggccgcgaggaggccgcagcccagtcccgagcaccgtagtcctccctggtccccatgctaaaaaaacctccatcccgagccaagcctccaaagttcgaaggcgctcacagtccgacagcttctgacgcctcgcgccagggtttcccgaaggtcccgcgctggggaaccctcggaactacacttcccggcaggctcagcgctgaggcgcgcccgaaggagccggacggaccacgcgggggccgctgggagttgcagtccgaccgcgagggggctgcgaggccggcggcgcggttgcctccctgggacgctgcccctaggcggcggccaaacgctgcagatgagcagacgcagatcagccgaggtcacggcgtaggcagccagagtgggctcaggacctccgccagcagtgaaaccgtcccggttcccggagacccagcttggacggctgtgcctaccccatgccccgccggggctcagaaccgcacaggtctataggggcggaaatctccgcttgagctcccccttcccggattacacgcgagcctgagctgtctccactccattgttttattatgtacaaacgctacagaacgagggggacagacacgcgtggggtaagaagggcctggtgggaggagttcacagagcagacggtgcactgggaccaggagagcagaacacaggccataactatagggcaggtggggcaggaacgggttaaaaacgagatccaagccagccagatcgcaggaggtgcgggggcgtcgtcccccttctgttctccccccaaggtcacagtgcatgcaataaaatatatatacaggagctagatccgtcctctgcaggggctctgagggtccagagctcccttcgggtggcgggaagccagtggcgctccctggcggccaggccgggctggagccacatgcgtcgggggagcgggggtcagtcccagccgttgtctttgatcatgtggttgagttcaatgatgtacttcccctctttgtacttctggctgctctcaaaggcctgttcctgaaaggaggggcgggaccgtcatccccggagcaacagtctcaccacaaggcactggggttgggaagtggacatgagtggccccattttacatatgaggaaactgtggcccagaggggcagggccgtatttctcacaaacacagagtagaatagaactccctgactcaaaggtacttttttaagtactaatgatggctccaacagagaagatagggaagtggctaaaagatttcacagttcagggtttgcaaactggtagcttcatggccattttggcctacaacatgtattatgtttggacagcagacagtttaataaaaataactttaaagtattaaaatataagtaggccttgctcactccagtttgcccagcctgcccccaactcccaaccctgccaatctatgctaccctttacacatctacagtatctgcttggccttgcaggcacttgaggtttttttgtttgtttggttttgagagggagtcttgctctgtcgcccaggctggaagtgcaacggcgcgatatcggctcactgcaacctccgcttcccgggttcaagtgattctgctgccttggccccgagtagctgggattacaggcgcccaccaccacgccgagctaatttttgtatttttagtagagatggggtttcaccatgttagtcaggctgttctcgaactcctgacctcaggtgatccacctgcctcagactcccaaaagtgctgggattacaggcgtgagccaccacacccagcctggcacttgagtttttgacctcttgtttaggccagctctttattaattattattatttttgaaacggagtctcgctctgtctccgctcactgcaaggctctgcctcctgggttcacgcaattctcctgcctcaacctcatgagtagctgggactagaggcgcccgccaccacacccagctgattttttttttttttttttgtatttttggtagagatggggtttcaccgtgttagccaggatggtctcaatctcctgaccttgtgatccacccgcctcggcctcccaaagtgctgggattacaggtgtgagccactgtgcctggccggccagctctttatttggtagaggtccagagtggccaagccacctgtccagagacacacagccaatctgtggcagggtcagcagcgagctcaggtcagggctggctggctggctctgcctgggacatccacctcacagaggcaccacagttccaagcgacgcctgaagaatcctgtcccttgcagtgtcccaagagcatcttcctgagcatctaatctgatccctgtaacaatcctgggtgctaggcagtggctttatcttccactgagagataaggaaatgagactcagggtagtgaaatcagaccctggacagcagcagtggcaatgaggactatggaaagggaggctggtgaacccaagctccatgttgttgcagagtctggggcaatttttctgatactctaaatgacaatataagctggtgaccaagggtttggagtgaaaaaaaaaaaccaaccaaccaactcagattctggtccctattctgttacttaccagttgggtgatcttgggcaagttacctaacatctctgggcctccctgtcttcttctgtagagataataatagcttctacctagaggatcactgcaatgattgaatgagataatagacgccaggcacacaacagtgcaaggcacataaacattccataaatggtgactctgattatatcctaactctctaatggggatccaagtgcctgggagagaagggatgggttaagagaaaagttctacaccccttgcaaggtgcaagataaagagaatgtggtcagggatgctgacttgtgtgagctcggcctatgcaatctgaaaggctatagggtgacagcttgtcaggaggaggtgttggaaggtcaggtcaaaggctagcctggggtcagaggtgggtgactcacatatttccagcccaaagtggtcttgcagttctcgcagtggatgtcggcgacagcatggaggccggtcagcagcacccgctcctcggctggcccgcagcccacgttcaccctgtggggacatggggtagtcccagggagggtcctgccatcacagggcccaccccctcaagcactgtgtctgtcctcagcatccaagaaatgatgctcacaatttcctgcctgcaccggggaactctgggagtctcagcaggatgccaggggtcacaggtcacaacagaggtcagggaaagcaagaagggaggccagatactcacactgagttgaagaggtaggcacgcccctgactgccctggaaggactaaagggtgagagggtgggaagagaggagggggtcagggctgccggtggggagctgccaggcagcccctataggttccagccccactgtggcctggttggttaccttggagatgaggtcgtcgtggttggccaggtgagcgcggcagtgggcacagctatacctccggtgacaatcatccaagtaggcctgaaacgtcttgggctttgaaatccgcaccatggcgggggccgggggcagtggccccacgcggggagcggcccacggggagcagagggagcccagtgcctgccggggagggagtaggtgggctgtcaggacctgggccacacacatgcgaggcactcccagagccgtggggactcgctctgtcacactgggctgctctctcctttccccagagccagcagcctctccggggaccagaggcgtctcggttttgactcagtgaggaggcctcaggttgcatccatggggaaactgaggctcggaggtgcccagggtgagtcacccgcctgcttccggcctcacccttgctgacctggcagctgaagctggaggaaggggctttggaggggctgggctgtcagttcccagtttcgggggagcatgggcgggtaggcactggttggtccttgcgacctcatctggagagcagtggggttcactggtggtttagggggttcatcggggagagggtcccccacctggaggaggtaggaggcctcgccgtgaaggttgagggtcacctaggaggggaggggctctcacctgcgggcgccaaggcctcctctacgctcaggggctcttacctgcaacgcggagccttacctggactccggggctcacctggggcgcgggggtgggggcgggcgccgggggagggggcagtcctcgcgggctgggcaggggcgcggggcgacacgcagccctgacggcgcgggcctcacctcgcctgggcgcgcggggcccggtccgccggggtgggctggcctgggagtggggggcgctcctggcgggcgccgtcccccccgggcccgggttcgcaggcgcctggacttgtttacaccgagcccagctgctgccgccgctgcggcgggagggggaggggacccgcctcctgtcccggcggccgccgtggccaatgggcgctccgcatgcaaatgagggggcgcgtcacacggcggccggcgcaggccccgaccgcccctcccccgccgcccgctcccgccggcccggaaatgcggctgcggcccgcgcgccccaggcctgctcgcattcctgcttgtggcccgcgcaggggcggggtcggaaggtctaggccgggcgcggagcgaggaagcgggtggcgctgggacgcatgctctgggggagatgagtataatgacccgcgtttgtccgccgcccgtgccccgctcaatccccgcatcaatcccgtgaggccgtttctcccgttggctccactgtaccgggggctgaggcccagggaggtctcgcggctccctaggttatccagctagtaagaggcgaagctggaattctcactgtgggcccattccatggcttttgccagagcgccagggacacactcagttcaccttctagcagggaagacccaaagatgcgcgcccctggcagccagggcgtcggaccaggcaattcctactgtccagcatcacctcctccaggcctctcggatgcctctgttgggacagctaagttcctcttcaaagactcaatttcctggtcataagctgtaaacagattctactcccgctttttcttctttgtcgcacgtctaccctatttgggaaagtttaaaccttagccaatcgggatcagctcagattgtgcggtccaaccccccagccaatggggaaaggacacagaaacaggaactgcgttagggttaaaaaccacttccctcctttgttggcgggtgctcttgggattgcaaccagcgcaagcagcacccttctgcagaagtaaagatgccttgctgggaagtcttctgtctcagtgctggtttttcttgactacactgagcacttgttttcaacaaatttgagggtcttctgggatcccattctcctttgggaggggtagcgattacttttcctcgtgagacacgtcccactgccttgttgcagtggcccaaggagcggaggatcgggtccacccaaagtgaggaataaatccggactttcagcaacgtgggcaggaaggagccttaaaattcccaggcaagtgggtaactctgtgcacagaccaaggtaagaaaagttgctactggggcgacaaagtatttccttggtggttggggtcacttggaggttgaaagtgcatggctgagacatgtcagtggacacgaatcgagtgtggagtccagacttggttccatggtcacctcataaggcttagggcggttttccagtcggggattataccgacccgctaatgctaagaggggcctgaaattcccacgagggaagcggccaaaaagtacgaagcgattattcatatgagtgcaagaaacctccaatgggaaaagggagaggttaagcccctaggaaatgggcaccaacctccagaatgggaaataccccaagtaagacagggagtacaaaaggccaagcagacaataaaattccccctgacagtcctctgggccttatgttagagtactggaggtataatgaaagaaccatgtaacacaaggaaagacagtgaatgataaaatattgctgttttatttggaccaaagaacctatcctcagaccctcagtcttttggccaaagtttggatcagacgaggattggatatgccaactcttaatccagtatgttaataaaaaaagtccagtctctcaagaggaaatagattatgctctgtgttggagacaggaacatgtccttccctttcccttaaaggatgacgtaaaagagaaaccaaactcagtaccctcctaggacaacccagttaagtcagattctacatctaaagatgccaatgtataggatcccctagaccatcttcccccgcctaccccacctcaggctaatcactcagtccctcccccacataaccctgccctgtgggccttgtggccccacatccccattgagcagccacccgaacatgtcctttcctcaggaaaactccagcacgagatggaacaatgccggagggatattcagaactttccttttccctcttcctcaaaggggtctgccccaaccccttttcccttaagtaccactgggaggagggggtattggtttcgtaaatgcccccttaactagttcagaggttagaaatctgaaaaaggaactcaaaccattatcagatgatccttttggagtcacagatcaaattgaacaatttttagggccgcaattgtatacttgggctgaattaatgtccatcttaggtattctcttctcaggggaggaaagaaccatgatccgcagggctgctatgatagtctgggaatgtgaacaccctcttggtcaaaacatccctgcagcagagcagaaattcccagcccaggaccctcagtggaataggaacaatgcagcccactgagaaaacatgaaagacctcagggatatgataattaaagggattcaggaattggtgcctcaaacccaaaatatttctcgagcatttaatgtacaccaagaaaaagatgaagggcccatggaatttttaaagacacttaaggagcaaataagaaaatattcaggcttagacatagaggacccacttggacaagggatgttaaagctctattttatcaccaacagtcggccggacattagaaagaaattacaaaagatagaaaattggcaagactgctccatagaggaacttttaattaagagaggctcaaaggccgggcatggtggctcaagcctgtaatcccagcactttgggaggccgaggtgggtggatcatgaggtcaggagatcgagaccatcctggctaacacggtgaaatcctgtttctactaaaaaaatacaaaaaattagccgggcgtggtggcgggcgcctgtagtgccagctgctcaggaggcttaggcaggaaaatggtgtgaacctggcaggtggagcttgcagtgagctgagatcacgccattgcactccagcctgagagacagagcaagactccgtctcaaaaaaaaaaaaaaaaaagaaagaaagtgattaactctgatttgggttccaccgtcagatttatttattgatttattgatttatttattaaaaaaaaattcccagggaagtggtcaggagaaaacgataccctattcccttagaagctagaatggctctaaaacctataattgagggcctcgtccatgacggaccccttgaaccctgtatgtccccttataacactccaatattgcctgtaagaaagtcagatgggtcataccggctagtagaagacctctgggctgttaatcaaacagctcaaactacccaccctgttgttcccaacccttacactattatcagcaaaatcccatatgatcaccagtggttcacaatgatagatttgaaagatgccagctgggcacggtggctcacacctgtaatcctagcactttgggaggctgaggcgggcagactgcccgaactcaggagtttgcaaccagcctgggcaacacggtgaaaccccgtctctactaaaatacacacacacacacacacacacacacacacacacacacacacgccaggcatggcagcatgtgcctataatcccagctactcaggaggctgaggcaggagagttgcttgaacccaggaggctgaggttgcagttagccgagatcgtgccactgcactccagcctggcaacagagccaggctctgtctcaaaaaataaataaaataaaaaataaaaaaagaaagatggcttttgggcttgccctttagcggaagacagccgggacatgtttgcttttgagtgggaggaccctcacttaggtcgaaaacagcagtaccagtggacagtcctaccccaggggtttacagactccccaaatctattcggtcaaattttagaacaagtcctagaaaacttttcccttccttcatccatatgcctactcgaataggcagatgacctgttcatttcaggaaatagcaaggaccacataaccacagtttcaattaacttcctgaatttcctaagggaacaagggttacgggtctcaaggagtaaaattcagtttgtagaacctgaggtaaaatatctaggacacctaatcagtaaaggcaaacggaaaatagtacctgaacgaattgaaggtgtcacatctctacctttgcctgaaacaaagcaggaacttagaaaattcttgggattagttggatactgtcgtctatggattgactcttatgcctgaaaaacaaaatctctacataaaaaactcacccaagaaggaccagacccccttctttggaccctatcagaagtccaacaagtagaagagttaaaacacctacttgtaactgcccccgttatagctttgccctccttagccattccaccttttcatcagtgtaaacaaggggttggctttaggggtactcacccaaagacacagaggccactggcagcccatagccttcctgtcaaaagttcttgacccagtaacccaccgatggcccgaatgtgcccagtctgtagcagcaactgctttgctaatggaacgaagcaggaaaataacctttgggggaagcctcattgtatgtacccttcatcacgttagaaccattcttaatcagaaggcaggaagatagctcactgactcaaggattttaaaatgtgaggctatcgggtgggtgtggtggctcacgcctgtaattccagcactttgggaggctgaggtgggcagatcacaaggtcaggagtttgagaccagagtgcccagcatggtgaaaccccctctctactaaaaatacaaaaaattagccaggcatggtggcgcacgcctgtaatcccagctacttgggaggctgacgcaggagaattgcttgaaccccggaggcggaggttgcactgagccgagatcagccactgcacttcagcctgggcaacagaacgagactccatcctccacccaccccccaaaaaaattgaggctatcttattagagagggatgatttaacattgaccactggtagttcgctcaactccgatgttttcctaacaggaaatccgaaccgggaggaacctgagcataaatgtttagatctgatcagttatcagactagagtcagactgcatctaagcaagaccctgttccaaactgggcattacctctttatagacggctcctctcgggtaattgaaggaaggaggcataacgggtgctctgtagttgacagggaaaccctcatggaggtagagtcagggagacggcccaataactggttcactcaaacatgtgaactctttgcattaaatcaggccttaaaatctctgcaaaatcaggaaggaactatttacactgactccaagtattttggagtagtccatacctttggaaagatctggactgaacgaggcctcattaatagtaagggccaggaccttgtctataaagaattgattatgcaagtactagaaaatcttcaactgccagaagaaatagtggtggtccacgtcccaggacaccagaaaaacccatcttttgaaaaccggggaaataacctcacagatcaagtagccaagcaagttgcctcttcctgagaggcacccattttccatctgaccccttgccttcccctccagtcgcaatccccatcttctccgacgcggaccaagaaaagttaaaaagaataggagctaaggaaagctcagagggaaggtgggtattaccagacgggagggaaatgctgtctaaacctcttatgagggaaatattatcacagctttatcaagaaactcactggggtccccaagctatgtgtgacacagtcctcaaagcctatgggtatataggaatctctaccctcgctagtcaggtggcggatagttgcctagtgtgcaaaaaaactaataaaacccgaaggaagcagcctttactttatcaagggaaccacccctataattgccaatccaaccagtgcaacccagtacttacctctattactacccctacctccaccgaccctaactccactctaggttgcttctatggcttaggagccgatgttactggaagggaccctataggcttctttgaaatatgttttgttcacccttctccacctcctaccgtctccccctccccaagcccaccaaatcaaaccattcctcacctcttacccaatgacaaaaccaaagtagctatagtagaagtcaaggacttaaagcaaaccctagccattgagaccgggtatcaagatgcaaatgcctggctggaatggattaaatattcttttcgcaccctgaataaaagcgattgttactcttgtgcagcgggcaggccggaaacccagattgtcccctttccactcagatgggccaaccaaccaggcatggactgtatggtagctctcttccagcacaccacagcctggggaaacaagacgtgcgccactctttcactacgtttcccaaagatcaggagccctacgggtcagctcccaaggaccatttgacttccacctctcaatgccagttacaccttgtgtctcccacaacaggacaaattgacgttccttggaaatctaatgggagtctaaaccttttcaagagctaaccaatcagtcagcccttgtctatccccgagcagatgtatggtggtattgtggactgttactgggtacgctgccaagcaattggagcagcacttttgctctaatccagttggccatccctttcaccttggcatttcatcaaccagacaggaagcaagtaacccaaagaaaaagagaagcccctcgtgggcctttgacccccatgtttacatagacagtagcagggtcccacgggagctaccaagtgaatttaaagcttggaatcaaatagccgctgggtttaagtctgttttgttctggtggtctgctataaataaaaatgtagactggataaattatatatactacagcgagcagcgattcgtcagttataccagggatgccatcaaaggaatagctgaacaattaggccccaccagccagatgacctgggaaaatagactagcccttgacatgatattggcaggaaaaggcagagtctgtgtcatgatctgagtccaatgttgtacttttatccctaataatacagccgccgacgggaccatcacaaaagctttacaaggccttaccaccctggcaaatgaattagccgaaaattctggactagataacccttttatgggtctcatggaaaagtggtttggaaaatggaaaggactcctggcttcaatctttacctctcttgcaattgtaacaagtgtacttatccttgtgggctgccgcatcataccttgtattcgtgggttaactcaaaggctcatagaaacagccctcactaaagccttcctctcttctctccctccatacttggacaagctcttgctcctggataatcaagaagaacaacgaagccaaatcctgttaaaattttttgcagaggaagaagtatcaaatagaagagaggaaattgttgggacagctaagctcttcaaagactcaacttcctggtcataaacttctccccgtttttcttctttttcgccagtctaccctgtttgggaaagtttaaaccttagccagtcgggatcagctcagattgtgcagtccatccccagtcaatggggaaaggacacagaaacaggaactgcgttagggttaaaaagcccttctctcctttgtttggggtgctcttgcgattacaagctgcgcaagtagcaccgttctgaagtaaagatgccttgctgggaaatctgtctcagtgctggtttttcttgactacactgagcacttgtttccaacacccctgtgctccaggctgggttaggtctgatctcagggaatgtctgtttcaacacgtgtctgcagttctttggcttgtgttgctcactgcagtgggcccagcctggtctagaggaggcgctcaggaagtatctgtgaaatgtgaatgtgtagttccttcagtgaatatggccctggggctgaagatggcagaagcattctgggagcttctggagaaggagacctgggaggagaaggttggaatggcgggggcagcagaggggctgggtgaactcagctgtcccacccaggcccatcctctgcagcccgagaaggaagctcacagggcaagacatggaagagatcaagttccctgcccggtgcctgggctgttgatggcctcaggaaaatggaaccattacctgttgctgtcaagtggctgggggccaggatgcctgggttggccgtgagaggacattgctgaggagagtggaggccaggctggggtggggtgtggcaggaggacaggaatgcagtggaaccagtgggtcaggctcctgagggccccaggctccagcctcagggctggcctgttccctcctaagctgccatcttcatatcttcaggacccacccctctactcctcaccctcagcacaacgatgtgatcgaaaggcaaatatttatttttcaggaagagaaacaggagacctcgaggcttctggacttaggaggtccgggcagctggtccatggttgtccaggtagtgccgcagggctgtgggataatccgttatgacgccagtggctcccacgctgaaggctgcttcaaaatccgactcttcattaaggcaccaaaagaccacctgagcagggagggagggggcctgtagattctgaacaattttacatctggagagtggggacccacctcctcctctatggagactccccagcagcagtaggctggagctgattgttaaattctcaggaattttgcaaagtggttattaaacccagccattattaaaaattaaatcatagcctgggtgcagtggctcacgcctgtaatatcaacactttgggacgccgaggcaggagttgaggccaggtgtttaagatcgagtgagacctcatctctacaaaaaactttgtaaaaattaattagcccggtgtggtggtatgcgcctgtgctcccagctacttggaagactgaggtgaaagaattgcttgagcccaggactctaaggctgcagtgagctatggttgcaccactgtactccagcctgggcgatacaacaagacctcgtctcaaaaaaaaaaaaaaaattatatatactgacaattaaattatttatttatttatttatttattttttgagatggagtcttggtttgtcacccgggctggagtacagtggcatgaactcggctcactgcaagctctgcctcccgggttcacaccattctcctgtctcagcctcctgagtagctgggactacagatgtccgccaccacgcccagctaatttttctgtttttagtagagatggggtttcaccatgttagccaggatggtctcgatctcctaacctcgtgatccacccgcctcggcctcccaaagtgctgggattacaggtgtgagccaccgcgcccggccctaaataaattattaaaacaacaagtggccaggcgtagtggctcacgcctgtaatcccagcactttgggaggccgaggcaggcagatcaactaaggtcaggagttcgagaccagcctggccaacatggtgaaatcccatctctactaaaaacagaaaaattagctgggcgtggtggcgggcgactgtaatcccagctactcagaaggctgaggcaggagaatcgcttgaacccaggaggtggaggttgcagtgagctgagatcacgccattgcactctagcctgggcaacagagcaagactctgtctcaaaaaacaaaacaaaacaaaaaacaaaacccaaaacaaacaaaaatccagtaataaatattcaaagcatatctcttgctaatcagtttcctattactgtgttcttgaagtgattaagtctgttgaggctgcaagatggaaatactacatgatggggtgccaccatgcatctcttcccattctgcatttagtggcttcatgtcggcagcctgaaactggccaagatgggagtatttaaaccaggaaaattaatcctcaaatcagggctttcatttgttcctctctgagagctagttgttgaccacttaacagcaccaccctcccccaaacccccattccactgccacctgccccagctcctgcagctctgccccttccctgcccgttgagtgggcactgaggtaggcggagatgggaattttttatttaaaaatacagatgagacgaggtctctctgtattgccaacactggagtgcagtggtgtaatcacagcccactgtagccttgacctcctgggctcaagtgatcctcccacctcagcctcctaactagctgggactacaggcatgcactaccatgcccagttaatattttatttatttatttatttatttttgagacagtcttgctctgtcgcccaggctggagtgcagtggcgtgatctcggctcactatagcctccagctcctgggttcaagtgattctcgtgcttgagcctcccaagtagagctgggattacaggcatgcgccaccatacccggataatgtttacatttttagtagagatggggtttcacaatgttggccaggctggtctcgaactcctgaccttagttgatccgctggccttggcctcccaaagtgctgggattgcaggcatgagccactgcaccctgcctctgcatttttcttttctttcccttttcctttcctttttcctgtttccctccctctcctccctctccctgtctctggctctcacgctctttcctctctctcttttgagacagtctggctatctctcccaggctggagtgtggagtgcagtggcgtgattctgattatagctcactgcaccctcgaaaccccgtgctcaggtgatcctcccatctcagcctcctgagtggctgggactacaggtgtaaaccactgcgcttggctaatttttaaattttttgtagagacgagggtctcagtatgttgcccaggctggtcttaaactcctgggctcaagtgatcctcccaccttggcctctcaaagggctgggattacaggtgggagccgtgcccagcctctgcctatggcatttcttccctgtacccttgatgggaagctcccacccctagtaccatagtgcctggaacattctcaaggatcgtttactaattaaatgatctggtggaagccaatgctcaggggagaggggggtgggctgggcctggtttctcccatctctcatctttccccagccccctctcatcagggatcatgatacatcattgttgtcatcataatggctaacatttatcaagcccttaataagtactagttacatatccatatgttggcaatgtcaggttaagaaaatatgtgcgtggccaggcgtggtggctcacacctgtaatcccagcactttgggaggctgaggcaggtggatcacttgaggccaggagttcgagaccagcctggccaacatggtgcaaccccgtctctactaaaaacacaaaaattagccaagcatggtggcaggcacctgtagtcccagctactggggaggctgaagcaggagaatcgcttgaacccgggaggtggaggttgcagtgagccgagattgcaccactgcactccagcctgggtgacagagtgagactcttgacacacacacacacacacacacacacacacagaagaagaaaattgtgtgtgttcgtgtgtgtgtgtgtgtgtatccagagagttaaatataccattttcccattttagggacgaagaaactgaggtgaggtcacctgcccgagtgatgcagctagttggcagcagagtgggaccggaaccctgctgccaggtctgtgtgcggtggaagtggtggtcacggcctcacctgcacccctcgctcctccaagtgtcggatcagactcttcctcatgatcagcctgggggtggggtggggacgtgggaggtgatgatgagaggggacctgggagaagggcagcagtaggtctctatggggacacgccacccagccatcttgcccacctcaccatttcgaaaccacagccaataactggttcaggcaagagcaggaaaatgggaaataggtcctgcagagagaaggaagtgggggttagctcctagggtctcccctgtcccagaggtggggtgggctggtagtgcccccgccaactagggtagcgctgccctcccaccccccagaatcccccagaataacctttgtagttgccccagtgaacaattcacccattgttcagagagcctactctgaccaccacgcttcaagggtgtggccctccagtcaccattcaccagataaggaatctgggccttagagaacgaaagggacttgccagacccaaagcagagtggtggtggggctgggccagggcctcgcttggttccaaagctggacatccaggctgcaggccctcctggttgggcctggccagcttcttatttatctatttatcttattattaatttaaattaatttttttttttttgagacagagtcttgctctgtcgcccaggctggagtgccgtggtgcgatcacagctcactgcaagctccgcctcctgggttcacaccattctcctgcctcagcctcttgagtagctgggactacaggtgcccgccaccacgcctgctaattttttgtatttttagtagagacagggtttcaccctgttagccaggatggtctcgatctcctgactttgtgatccgcccgccttggcctcccaaagtgctgggattacaggcgtgagccaccgtgcccggccattaaaaaatttttgtagagacatgtctcactatgttgcccaggctggtcttgaactcctggactcaagcaatcctcccgcttcagcctcccaaaagtgccaggataataagcacgagccagccaagtgtggtggctcacacctgtaatcgcagcactttgaaagtctgaggtgggaggagaccagcgtggccaacatggcgaaacgccgtctctactaaaaatacaaaaattagccgggcgtggtggcagaccctgtagtcccagccacttgggaggctgaggcaggagaattgcttgaacccaggaggcggaggtttcagtgagccaagatcgcactactgcactccagcctgggccacagagtgagactccttctcaaaaacaaaaaacaatggccgggcgcggtggttcacgcctgtaatcccaacactttgggaggccgaggcgggtggatcacctgaggtccggagttcaagaccaccctgaccaacatggagaaaccctgtgtctactaaaaatacaaaattagccaggatggtggtgcatgcctgtaatgccagctacttgggaggctgaagcaggagaatcgcttgaatctgggaggcggaggttgcggtgagccaagatggcaccattgcactccagcctgggcaaaaagagcaaaactccgtctcaaaaacaaacaaacaaacaaaaaacccacaaaaaacctcgtgagccactgtgcccattggccagcttcttgagaccagacagcacttagtgggacgacccctaattatcccactccaggggtgactttagagacccttgacagtgtcctagggcaggctctggagtcagacccagggaaaacctaagctctggatttccagctgtgtgtccttgggcaaattacagaacctctctgggcctcagattctctagggtaccatgggagtcatgattcttatacctcctgggggtgctgcaaggtaaaagtcaacccaaaatatgttaaaacactttataaatcttgtataaggccgggcgcagtgggtcacgcctgtaatcccagcactttgggaggccgaggcaggcggatcatgaggtcagattaccatcctggctaatacggtgaaaccccatctctactaaaaacacaaaaaaattagccgggtgtggtggcgggcgcctgtagtcccagctactcgggaggctgaagcaggagaatggcgtgaaccagggaggcagagcttgcagtgagccgagatcacgccactgcactgcagcctgggcaacaggggaagactcctcaaaaaacacaaaaaaaatccggtataaaaaggtggtacacaaatatcattgatctctttgtagcaaggtattgtgggggctgagtgggacttccttctggacaacagaggggagcagagagctctgggactaccacagagaagctgtcagaaagcaaagggagaccgggcccaggggctcaggtatgtaatcccagcactttgggagaccaaggtgggaggctcgcttgagctgaggagttcaagagcagcctggtcaacatagtgagaccttgtctctacaaataatttaacaattagccaggtgcagtgttgcacgcctatactcccagctacttaggaggctgaggcaggaggatctcctgagcccaggaggtcgaggcgcagtgagtcatgatctggccactgcattccagcccgagcaagactgtctcaaaaaaaaaaaaaaaattgtaaagcaaagggagggactaggcttaagtgccagcgaagtatccaaattcctgatcctttccccagctgttactttgttaacccctgccttcctgcagaacactgacttggccttttcctgctgagggtctgagacagccgtgctataattaatgaacgaatgtctccccagccagactgtaagctcaccaaggacctctccccaccctcactggtctcatttacacattataactgcacctgggacagagtagacattcaataaaatatgctagatggcctgagatggataaattacctctctatcctaaaactccacatatgcacagaatttcagggtgttcacagttcccttagtattcatgaatgctgggtaagaaccactgtccttaaaagaccttgggggttatctctgaggggagctggggagctgggaagatctgggctccttctccacggagaccctaagcagtggggagtttttctgaggtccgccccccactggtacctgttgatgatgttgggcaggaagcagaagaagaacttctcagggattgggatgaagggcagcagccccaggtagtaggaaagcagcacccagaatcctcggcttattgtgaaggacaggggcatctcggggttctggggaggcaaggagaggcatgagaatctgtctgctctggggaagcagagaggaggcatgagctgcaggggagccgtggtgggcattccagaggccctactacctgcaggatccaagtcacatcttggggctgggtgtggtggctcacgcctgtaacctcagcagtttgggaggctgaggcaggtggatcacctgagatcaggagttcaagaccagcctggctaacatggtaaaaccccatctctactaaaaatacaaaaattagctgggcgtggtggcgtgcacctgtaatcccagctactcgggaggctgaagcatgagaatcgcttgaacccaggaggcagaggttgcagtgagccgaggtcgcaccaccgcactccagcctgggcgacagagagagactgtgtttcaaaaaagaaaaaaaacaaaagtcacatcttggctctgtgttcgaggcctgagttcacacccttttcattgccaccgccacgccactgggaactctcccagacccctctagctcgggtccccatgctgggtgggctccagctctggggaggaggggcccctggaggaggaagaggacgggggaggggtggggggactcacggcagccttgcatttcttcatgaccgagctcttctccgaggcccagatggtgatttcattacggtcatagcgtctcaccaagcctgctatctgggaggaggagaaggaggtgaagggagagccaggcctctctcacgcccccggtggccgccctagccctgcctgcagcaccacctcacggatgagctcttcgttcttccctttgatctctacgctcatgggtgtccttggaaacctctggaacaggtcctccagacgaaccatgcgccggtctgacccgtgagcaaagtggcctgggggtggtgtgggaaaaggggtcagagggaagccaaggcggaggtccaaggaaggcaggcatggcccaggcagggctcgaagcccttgctctcacctggagagaagtaaacctccagcttctccttgtagaggggcaggtcctggggaggacaggaaggatgtcactagaggcccgcattgggcatggtgactctcagggtgggggttggggtgtcagggcagggcccacctcgaagtccaggctgcccacatccctgtttaggcccgactggcggcacaggttctcatcatgtgacaccaccaccactctgtcccgtgtcagctgacagtcgagctccaggaggtccgagcgctgggccatggagctgtgggggtgaaggtcagcggggggcaggggcaggggactgggatgaggggcatggtggctgggaggtggccgggaatgtgagagcggagttcgtggcgggatgtgcaggccacctccagggggcgccagtcacccagctaggaagtgaatggcgtcccttgctgtgatgcagtccacgacctgcacaccctcacatggcagcctgggcaggggcagatacactcacttctccatggcctccatggtgttctccagcagctctccagatcctgtggggggcactggagtgggcctctggggcttggggtctaggggcctggcccaacctcatcacccacattccctctctgggctccatcctccctctggcctcacctccccagccagcccaggctgcgccagcatcttcttcctcgtccacaccctgccctgccacttcgctctccttctctcttggtccctgccccgtttctagcatgcccccttggacctacccctctgtgctgtccactttggcacctgttctcacccctacccggctcacctcctcggtgggcccccaggcggatgcggaaggtgggagccctgggcgtgtgcagcagatgaggccggcgcaggaagaagatggagagcatggcatagctgcccagggcagggagggcatagtacagcaaaaggctcatgaccgtactcccacagaagctcctgcagccacacgctcagccgtccgcgggactgtgctgcctgcctagccagtgtgggccggctctactactggccactgccacgcccctgggacctgctgagcctgccgctgggctggcttggagccaggctgcagggttcggctgaagctggggtagtgtcaggaggtgaggcaagtagccctggctctcatatccccaggcccttcccagcccccagcagccccgtcctgggctacatgaggggagtaaaaaccacccaggactgtcaggacctctccctctcactggtacttgtagccagcgcatccaacatgcctaccccttgccatttcagaggatccaggggtgtgtagggtgctcctgagtcaccccgaatcacccccagccagttagacaggaagccattagcgagaggacaggacagtgactaaggggaaaactgacccccttctttctaggagtctggagctctccagagccccgtccccagccctgggcagctgggagtgaagggcaccaggcccctgaaagcccaagtcaagtctgtcctcagagccgcacggggcagggcgggggcgtcgcgaacacagacagagccagggtcagccatagacacatctctatatttatatattagacgggtcagggaggtggcaggggcgccgggctctccacgccccccagctccacttctgctcaccacacacagaagcagcgagggcacgcgaagtgacagctttgacagggaggggattcggcccggcctggctcctcagggatgctagcccttgagactaaggaatgttccttcagggaaactagggtggggtttgaatgagatgaggggggcaggcatggccctgagtccctactcagcgccccccaccctccacctctgcccttcagcaggttggggcagccagaacccttccattccagaactgccagagactgggacgctggggaaggtaagggcgcagcagcagcagcgggagattgaactggggccacctgaggtcccgaggccccgtggggagggcgggtggggaggagaaggccttggcctgcctgaagctggaggcctcagcaaaggagagaggtggccaggcccatgctccaccccggcctgggctgccaaggtccgggctgggcacagtgtccattttctaacagtctggcgggagaggggcaggcaggaggcaggtcctaaagagagaagcaggcagaagaggagtcgttagcaccccccgggcagacccactggagccctgacctcaacatctctcatttcaccctcacagctggataggctgggtctcagtttccttatctgtaaatggagataataatagtacctagcttgaggtactgctgtaagattaaaggaattaatacatgtaaacctcttagaacaatgcttagggctttatgctttcattattagaactgtctcggccgggcacagtggctcacgcctataatcccagcactttgagaagctgaggtggtggatcgcttgagcccaggagtttgagactggcctgggcaacatagcaagaccccagctccacaaaaaaaaaaaaaaaaaattagccggttgcaatggctcgtccagctagctgggaggatcccttgcacccaggagttttgaggctgcagtgagctatgattgcaccactgcattccagcctgggtgacagagcgagacactgtctcaaaaaaacaaaaccaaaaaaaaagataaatagattgactccggaaactgaggcgccgagaggtgaggtgccttgcccaatatcacacagcacttactaagtggcacagctggagtttgagcccaggtgcgcatgccttctttctatcaggccacacctggctgaagacaggaagagaccggaggaggcaaggaggcagcgtgggtgggggcaggccagtggggtccccacagctatgtgaactgctgatctggcagcaggtgtgaggaggcctggcaatctgggtcaggctgggcgctgctgggcccctcccaaagcaatcatggccccacctgcttctgccacacccagagctgaagcttggctcaggtcctcacctgggtgacagaggccctcagtgacctcttgcctctttgccagttctgttcctagaaggagattagaatggcttgtggggctggaggatgcaaggtgttgacaggcagagacatttggggctggaggactcggtgggccaccagtctgggcagccttgggcatttttttttttttttttgagatggagtcttgctctgtagtccaggctggagtgcagtggtgcgatctcggctcactgcaacctctgcctcctgggttcaagcaattctcctgcctcagcctcctgagtagctgggattataggcatgtgccaccacacccagctcatttttgtattctttacagtagagaccgggtttcaccatgttggccaggctggtctcaactcttgaccttgtgatccacccacctcggcctcccaaagtgctgggattacaggcatgagccactgtgcccagcccttttttttttttttttgagagagtctcactgttgcccaggctggagtacagtggtgcaacctccgcctcccaggttcaagcagtcctcccaccacagcctcctgagtagctgggactagaagcgcatgcctacgtgcccggctaatttttgtatttttagtagagacagggtttcaccacgttggccaggcaggctggtctcggactcctgacctcaggtgatccacttgcctcagcctcccaaagtgctgggattaccagagtgacccactgtgcccggctaatttttgtatttttagtatagatgggatttcaccatgcaggccaggctggtctcaaactcctgaccctcaggtgatccactcctctcagtctcagtctcccaaagtgctgggattccaggcatgagccaccacacccagccccctgggcacttctgttgtcaccagacacattgaccatgggtgtggggtaagcttgctgctgtatggaggcatgtacagatagatatagatatagatatacagatatagatatttagtatcagggtgtccatgtgtgggccatggagacactcaccaggccccagggtgcagagatgtctgtctgggctagggggcctccagcactccgggctggaagcgtgctgtctcctggaagatgagctccttcagccgctccttaggtaggtcatccagctccatggcgaaggtgaagggctcctcggccactggctggggtggtagagacagcaaggctcaggcctggcatgggggatgcctacgtgcccccctgctcccctgcccccagccccactgctgctggggactggcccacctcatccgtcgggtcatagtactgctccaggtaggggtgagccagcgcttcctccactgtgatccgtttattggggttaaaggttaacatccggtccagcaggtcaagggctatggaagggcaggagtcaggggtcacagggaagactggaggagctccgagaagcattgctttgcctgtctcctccagcggctgctgggctcacacaccctccacgacacccaaggtttatcccacacccaccctcatgtctctcgaacctttggagtctgacttggggaaaagcttggcccaagccaccttggtcttggagggcagagactgtaggtagtttcgggccttcatgttgatgatacaattcaggtcctcctgggatggggagcccaggatgcctgtggataaggaggtgacttggtaaatgatcacctctttctttctgggaacagaataggcaacaaggcaagaacaagaccccccagcccagcaacccatgccaatccctcagtcacctcctagtcattagcatggtggtgcagagcaagggggctgggttcaggcagaccgaggctcaaatcctaggtctggtgcctcctcaggtgtgggacttagccttgcttttcccatctatccaatggggataatatctatacctcattgagataccatgagatgctggaggcaccccacacgtggtggtatccctgacttggactctcgagaaatctcacctcggaaaagctaatcatccccaactcagccagccgggcctccctcacccagaatgtggttgagctgatccaggtagtgcttgccagggaagatgggccggttagagagcatctcagccagaatgcagcccacagaccagatgtcgatggacttggtatagccctgggggagaggaggaagtggtgagctcctgggccagcctcaacagggtcctgttgtctgcgccaggccaccacctccaagttagatccaacaccaggcagaaggcagaggcctggagggctcaatgctcagcttccttgcagagcccaaggcccagagggtagaattcctgtgtcatgggggtcagtgtctggctcagaggtagctccagggcttcctgggaactggtccgttcctttcaggagtgggcagcccctcctaccttggagttcagcatgatctctggggcccggtaccagcgcgtagccacatactccgtcaggaagccggtgtggtcatgctcaggatcggcaatccgggccaggccgaaatcacaaatctggaatcagacctagctgctaagctcggcgctcaaggcctctgcagcctaagcagtcacgcccccttgtctttgcctccactgttccctttgcttgcaatgttctcctgcccaaggcttcttctactggtcactggaagccccagaccctgggggaggaggggacaggtgcccaaccctctgaccttaaggtcgcaggtggtgttgatgagcaggttggagggctttagatctcggtggagcacgttggcggagtggatgtacttgaggccccgcaggatctggtagaggaagtagcagatatggtcattgctcagctgctggcttttcagcaacttgtacaggtcagtctccatcaggtcctgcacaatgtagctgaggatggttccgcagacccccccaggcagggggcagtgggaggcacttggttaaggaaaacaggctctgaaggcgaggctgcacacctcctccagccagggcccctgggactcaatagatctgccaacctgcaccaccagctggggaagctgctgccattacccagcggcagggctctgagcctctgttgcatcacagttgctgatcctgagcaaggggcttcatttctgaggcctcagtttccctaccggggaaacggggataataataaactgtgggaggcaggagaacttcacagttaagagcagcaacttgggccaggagtggtggctcacacctgtaatcccagcactttgggaggctgaggcgggaggactgcttgaggccaggagtttgagaccaccagcctgggcaacatggcaaaaccctgtctctactaaaaatagcaaaattaactgggcacggcggcatgtgcctgtaatcccagctactcaggaggctgcagcacgagaatcacttgaacccaggaggcagatgttgcagtgagccaagattgtgtcactgcactgcagcccggatgacagagtgagactctgtctcaaaaataaataaattaaaaaaaaaaaaaaacctacaaaaagagcagcaactctggagttaacccatggatgtctgaaatctcctctctactactcactggctttaggatctcaacctgtctgtgcctcaactttctcatctggtatgtaggggaaataatgtttttttgtttgtttgtttgttttctttttgtggagatgggctcttgctctgttgcccaggcaggtcttgaactcatgggttcaagtgttccttccacctcggcctcccaaagtgctggaaattacaggtgcaagccatgaaataatggttcttttgagggtggttgtgaagactagatgagatggcgcatgtaaagctgtcagcccagtgcttggcaagttgtgagtgctaggcaaacatgaactattattactaatatgaatgcctgagtcacatggctgttgagggagttaaatgagataatgtatgaacaccatctggcatgcaataaatgtttgcttaaaaataaatgcctgccttatgggaatggtttgtgcaagaaaaatgaggagacactcccaacagcacactcccactcaaaggagagtgcttggccatacctcagaagatggaggagtaaaatgtctttttctatttgaagatacaaaaaagcttatgcgtaaataaataaataaatccacaaatgctgtttggcttgtctctagaaaaataagtcagggctgtcttttagaatctgccttgagaccaggcatggtggctcatgcctgtaatcccagctcttcaggaggccaaggtgggttgatgacctgaggtcaggagtttgacgccagcctggtgaacagggcgaaaccccgcatctactgaaaatacaaaaattagccgggcgtggtggcaggcgcctgtagtcccagctacttggaaggctgaggcaggagaatagcttgaacctgggaggtggaggttgccgtgagctgagattgagccactgcactctagcctgggcaacagagggagactccatctaaaaacaaacaaacaaaaaacaaagaaaacaagaatcagccttgaaagggtcttcagagaatatgtggaccagccctgctgttttagggctggggaggcccagcgagacgcagtgacttgcttcagatcacacagcgagctgggggtgagcacggagatttcctgtccacagtttgtggtgggggttgcagacacctcagtacaaatccccactcttgggtggagggctgggactgagagtgggtgggtggggcagggaagaagtgacaggtgtcataagttgctaaggagagccagacaggaagtggacagcaaactaggaaagcagtattgggggaggacagccaaggctaggctgtccctccctgggcaaggtgcaagtccacaggtgattagggtgtggctctgagtgagaagtcctaagaagaaggacaagttcccatctgggggaggagaggaggagacagcaacagaaacacttgattttaggttttctgagccttagcttcctcatctttttttttttttttttttttgacagggtcacgctctgtcccccaggctagagtgcagtagcacaatcatagctcactgcagcctcgaactcctaagctcaagccatcctcctgcctcagcctcccaagtagctgggactatagtcgtgtaccaccaaacctggataatttttaaattttttgtagaggtggggtctcactatgctgcccaggctggtcttgaactcctggcctccagtgatcctctggtcttagcctcccaaagtgttgggactacagatgtgagccattgcactccacccctcatctttgaaatgaagctgaaaagcccatctcatagggtagttgggaggtgtaatagaaaaaaaaaagcattgggcatgtatagtacctgacacacagcaggccctcaagaaaggcagttttttgtttttgtttagttttgagacagagtctcgctctgtcacccaggctggagtgcagtggcacgatcttggctcactgcaacctccagctcctgggttcaagcgattctcctacctctgcctcccaagtagctgggattacaggcttgcaccaccatgccccgctaatttttttgtatttttagtagagatggggtttaaccatgttggccaggctggtctccaactactgacctcaggtaatctcccacctcagcctcccaaagtgctgggattacaggcgtgagccaccacgcccagctgacagttttctttctccctgtctcccttccggtctgggcaaggaggaaagagaggaaagaatcatccattccttagcaagaagtgactgtgggcagaggccaggtcatgtctcagaactgccgacgtcagaagacaccactcccatagagaccatcctgcctagcccttccccctggggcacagagcagagaacccacttgctcgaggccatactgcctgggccgctgcaggcctgggttcatcagaggtctccaagtcctgttacactgtggcttcccctctgcaggaaagtttattttactgggtttgttttggagggtggtgggtaagatggaaacagaaaccaagcaacgggtccccagcccagctgcgaggccgtgcctgaccagccgactggccaaggtgaaggatacacatctctcatggcttccagggtggacgcccgcagaatgtctcggatgccgatgacattctcatggcggaagcgcagcaggatctggatctcccggagcgtgcgctggcagtaggtctgatgttcgaaggggctgatcttcttgatggccacgcgagtcttgcgcacgtggtcataggccgagctgaggggaccggagagaggctgctgctgtggccttacaaagggggagtccgggcctggtggccccacccaggccttggcagggaggggagagagcaggagctggctctggtcaaatcataaacaatgctggttccttcctgctgtggaggcctgggatctccagagagaaagctggggaccagccaggcggcccttcggtgactttacaaacagaggaagagactgaccgctcactgacttcccctctcctcaatccccttccattctactggccctgaacccttcgcccccattcccaggaaaggctccttaacccaagacaggtccgggggtgcagatgctggggacacaccatggggcaaatactgggaaggtggcagccaggggaggggcaggagagaatggacagggcaggggagggtcccagggtgagggatccgggcagcggggctgtcccagagggatagaggcccagagcacacggtggggccgggggcactcacagacccctcccaaaacatgcaggtggcactcctggccgcctcatctctctctgggcccctggggtggtggggccaaagccctgccccaccctgatctcggctcttctcccccaggctccctggcactgcctcacagggggaatccaagacaccctttcccccaaaacgggccctccactgcctcttcactaaggatgtcgcctccccgagagtactcatcctctgggcctcgccccgtgtcactagggtccccgcgggcccccacatgcactcggatgcccctcccatcattacagaagggtggactcaaagcctccaagcctgctcccctgaggacgtaggcagcgccccctcccccagaaagcactcaggggccccctccctgggacgctcccgatcatcccgagtctcctgcctcctcgggacgctccgcgtctccacgtcccggaaagcgctcggcgcctcctcctcctctcccgcgaagccccctcccctgagggcaccccctcccccggaacgccccctcacctgaccatgccgtacgcgccctcgccgatgtactgcaactgcgtgtagcgcgggcccacgtcgaacggctgccccttcaccatctccacctcccccgggacccccgggccgaccccctcggttctacggggctccccgcccccgcccccctgagccgccgccgccgccatctccactcctcccctcccaccgccctcctccccacggcggccccgcccgaggccccgccccttcccgcctgcctgtcacccgcagggccgcgcgcgccaggccccgcccttgccccggccccgcgtgggcctggagctgtcacgtgacccgccccgcgcgcgcccgcccttcttgccccaggttcgggggccatgggtccctgcgggctccgcggcctccaggtcaccgggaggttcggcagcgccgcctcggagactgtcctcaccctcccctcgatggcgaagcggccagggcgtgacctaccagagccacccagccaatgtatgcggcagcccaccagaacctgggcccgggatcaccctaggttaaaaataatgttctaataaatggatcaaattttacagatggagaatctgagagttaggtttactaacttgggtaaggtcactagtagtgacagctgagactcaaaatggtgtcttctgacacagagactctttctaattccatgcctctcagagtcctagactgtttttattttattatagagacagggtctctctctgtcgtccaggctggagtgtagtggtgcaataattgctcactgcagcctcaacctccctggggtcaagtgatcctcccacctcagcctcccaaagagctgggactacgagtgcgcgccaccacgccctgctaattaaaaaaaaaaattggggggctgggcacggtggctcacgcctgtaatcccagcactttgggaggccgaggtgggcagatcacctgagtttgagaccagcctgaccaacatggtgaaaccccgtctctactaaaaatacaaaaattagctgggcatggtggcacgtgcctgtaatccaagctacttgggagactgaggcaggagaatcgcttgaacccgagaggaggaggttgcagtgagctgagattgcaccacttcactccagcctgggcgacagagcaacactccgtctcaaaaacaaaaaacaaaaagaagaagagaaaaagtagggttgcagaaggtagggactgaagaaaggcatgaaggagaaggatcggggtgagctgaggcataaaggcagaagcataacttgtccagcatggctgcagtaaaaaaatgatgaggtttcagcctggagaggtaggttggggccagattaggaaggctctggattctggcaaggagtttggatgttactcagtaagcagtaaaaaccctagagggacttttgccagatcattttgcaactgcgggagaatatagtgactcagagaaaacactatggagttcagcatggagccaggtttgctgagtgggagtgagtttcccagcataggaaaggctggtgtatcagagctgcaagctgccacctcctgctgctggaagctcagttagagtgtgactgagattcccctctagtgactgaggttggcatttccttggaggactggactgggatttgttctggttcatagacgcatattcaactaatgtagacttaccatctcttctgtgccaggcacttttggtttttttttgtttgtttgtttgtttgtttttttgagacggagtcttgctctatcacccaggcaggagtgcaagctcactgcaacccctacctcctgggttcaagtcattctcccacctcagcctcccaagtagctaggattacaggcgccagccaccacgcccggctaatttttgtatttttagtagagacgaggtttcaccatgttggccaggctggtctcaaactcttgacctcaggtgatccacccacattggcctcccagagtgctgagattacggcacctggcttgccaggcacttttatgtacactacctcctgtaatcctcacagcagccatatgaagtagatactattaacatttaactggaaaatgatgctggctggtcgtggtggctcacctctgtgattccagcactttgggaggctgaggcaggctgattgcttgaccccagcagctggagaccagcctgggcaacatagtgagatcccatctctaccaaaaatacaaaaatgagctgggtgtggtggcatgcgtccgtaatcccagctacttgggaggctgaggcaggaggatcagttgagcccaggatgttgaggttgcagtgagctctgatggtgccactgcactccagcctgggtgacagagtgagagaccctgcccccacccccacccccccaaaaaaagggacagagggaaaacgatgtggaagcttacgctctgtcacccaggctggagtgcagtggcgcgatctcagctcactgcaagctccgcctcccaggttcacgccattctcctgcctcagcctcctgagtagctgggactgcagacacccgccaccatgcctggctaattttttgtatttttagtagagacggggtttcaccgtgttagccaggatggtctccatctcctgacctcatgatccacctgcctcggcctcccaaagtgctaggagtacaggcgtgagccactgtgcccggcagaattatttttctagcacagggtcttgctctgttgcccaggctggagtggagtgtagtggcaagatcataggtcactgcaggctcgaactcttaggctcaacagatcctgccaccatgcctagcacacacaaccacgcctagctaattttttttttttgtttttgaaacggagtcttgctctgttgcccaggctggagtgcaatggtgcaatctcagttcactgcaacctctgcctcccgggtctcctgcctcagcctcctgagtaggtggaactacatgcgtgtgccaccatgcctggctaattttttgtatttttattagagagggggtttcaccgtgttagccaggatggtctctatctcccgacctcgtgatccgcccgtgtcggcctcccaaagtgctgagattacaggtgtgagccactgcgcccagcatttttttttttttttttgagatggagtctccctctgtgcccaggctggaatgcaatggcacaatctcggctcaccttgacctctacttcccaggtcaagcgattctcctgcctcagccttacaagtagctgggattaccggcacacgtcaccacgcctggctaatttttatatatttagtaaagatggggtttcaccatgttggccacgcaggtttcaaactcctgacctcaagtgatctgcccactttggcctcccaaagtgctgggattacaggtgtgagccaccgtgcctggcttggctaatttttagaatgtttgtagagaagggttctagctaatgttgcccagtctggtctcaaatttctaggctcaagtgatcctctcacctcggcctttcggagtgctaggattacagtcatgagccacttcggctggctccagattaaatcttaaaccagttattagctttttgtgattttcaaggtctggcacttctttttttctttctttctttctttttttttttttttgaggcagtgtcatgctgtgtcgcccaggctggactgcagtggtgcggtcatggctcactgcaacctctgcctctcaggctcaaatgatcctctcacctcaaccttctgagtagctgggaccacaagcatgtgtcaccatgcccagctaattttagtatttttggtagagatggggtttcaccgtgttgcccaggctggtctcaaatgatccgcccaccttggcctcccaaagtgctgggattacaggcatgagccaccatgcctggcctgaaatagttatttattcttcttattattagtagtagtattctggtctttcatgaccgtagacttttgaagattataggtcagttattttgtagaatgtccctcagtttgggtttgtctgatatttccttgtgattctcatgtcactttgcctttactattgtattgtatcgagacgaggttcaccatgttacccaggctagtcttgaactcctggtctcaagagatctgcccaccttggcctcccatcatgctgggattacaggtacaggtgtgagccactgcgcctggcctttcttttcatttcatttctttccttttttttgagacagggtctcgctctgttgcccaggctagagtgcagtggcatgatcacagctcactgcagtctcaacctcccaggctcaaatgatctcccttcctcagcctcccaagtagctggcactacaggtacacaataccacatctggctaattctttttgtatttttattaggatgggtttcaccatgttggccaggctggtctcaaactcctgacctcaagtgatccacctgccttggcctcccaaagtgctaggattacaggtgacagccactgcgcctggcctaattttttaaattttttgtagacacgacagtctggctatactgcccaggctggttcttttttttccccctgagtcagagtcttgccctgtcacccaggctggagagcagtggctcgatctcaactcactgcaacctccacctcctgggttcaagcaattctcctgcctcagcctctcgagtagctgggattacaggtgcccgccaccacgcctggctaatttttgtatttttagtagagatggggtttcaccatgttggccaggctggtcttgaactcctgacctcgtgatctgcccgcctcggcctcccaaagtgctgggattacaggcatgagccactgcgcccggccccaggctggtcttaactaggttcctttctgtctgtctccttcctcctcagatatgcctaaaacatggccctgatgaggttgtagtaggcaggaatctttcagtaacaagtcttcaaagacccaactcaaaaggactcaagcaagaaaggaggtgcattggcttactgactgtgaagacacagttggctccactgactcaaacagtatcattaggactttgatccctcccttagctcaactttcttctgagttggttccattcttagccaccccctcctctcagagtagccagatggaagctagtacttgcagattcgtgtctggttttttcagtaactccagcaagggaaagctcttctctctctgtctctctttctccctgtctctgtctcttgtaatgcaaggcctagatttgactcttattggttactagtttttttgagacagagtctccctctgtcacccaggctggagtgcaatggtgcgatcttggttcactgcaacctccaccttctgggttcgagagattttcctgtttcagcctcccgagtagctgggattacaggcgcccgccaccacgcccggctaatttttgtatttttagtagagacggggtttggccatgtgggccatgctggtctcaaattcctggcctcaagcgatccactcacctcagcctctgaaagtgctttgataacaggcatgagccaccgtgcctggccagttactagttttgtttgaagcctgtgcaaatccttcaacctgaatcagtgtggaattgggggtttagttatctctactggcatgacataaagtaggctagggaagggatggttttcccaaggaaaattcgggcaccatccccagaaagtgctgagcagacagttacagcagtgtctattataatatatatatttttaattcctccccccacctttttttttttgaggcaaggtctcgctctgtcccccaggctggagtgcagtggcaccatcatggctcactgtagactcgaccacccaggctcaggcagttctctagcttcagcctcccaagtagctagaactacaggcacacaacaccatgtccagctaatttttgtatgtatatatatatatatatatattttttttttttgtagagatggggttttggcatgttgcccaggctggtctcaagctcctgggcttgagaccagtcctccccaccagcctcccaaagtgctgggattacaggtgtgagccactgctcctggcctaattcctctcattaactaccaaatgaagtccaccacccctggctaattttaaaaaattatttaggagataggggtctctccatgttgctcaggctggtctcgaactcctggcctcaagcaatcctcttgtttcaccctcccaagtagctgggattatagatgcaagccaccatgttcagtttagattgtacaatttcttttctttttttcttttcttttttttttttgtttgagatggagttttgttcttgttgcacaggctggagtgcaatggcacgatcttagcttatggcaacctctggctcccgggttcaagtaattctcctgcttcagcctcccgagtagctgggattacaggtatgcaccaccacgcccggctaattttttgtattttgttttagtagagacggggtttcttcacgttggtcaggctgttcttgaactcccgacctcagctgatcctcccgcttcagcctcccaaagtgctgggattacaggcgtgagccactgcgcccggctagatcgtacaatatcttgaaggccattatgctggtgtcttccctttgaagccctcttatattttgttggtgcaaaagtaattatggggtgggcatggtggctcacacccataatcccagcactttgggaggccaaagaggggtggattacttgaagtcaggagttcaagaccagtcttaccaatgtggtgaaaccctgtctctactaaaaatacaaaattagctgggaagactagtttcctagacggggtttcaccatgttgtccaggccgatctcgaactcctgaccttgtgatccgcccacctcagcctcccaaagtgctgggattacagccagccaccgcgagccaccgcgcctggccttattttttattttatcttttttagagacaggatcttgttctgtcacctaggctggagtgcagtggcctgatcatagctcactgcagcctcgaactcttgggtttaagtgatcctcccacctcagcctcctgagtagctaggactacaggcacacatacaccacccctggtggtgtgtgcctgtagtcccaaaccagtctgaaaagatagatgtgggggccaggcgcagtggtgatgcgcgtctgtagtcccagctacaggactgaggcaggagaattccttgagcctaggatttttgttttgttttgtttttttgagacagaatctcgctctgtcgcccaggctggagtgcagtggtaagatctctcagctcactgcaagctccacctcccaggttcacgctattctcctgcctcagtctcccgagtagctgggattacagacgcctgccaccacgcccggctaatgttttgtatttgtagtagagacggggtttcaccgtgttagccaggatggtctcggtctcctgacctcatgatccgcctgctttggcctcccaaagtgctggtattacaggcgtgagccaccgcgcctggcatgagcctaggagttcaaggctgcagtgagctgtgattgtgccactgcacttcagcctgagcgatagagcaagacctacaaaaaacaaacaaaacccaaaacagaatcacatgtaacacacagctgtggactgattggttgacaaaagtgtggtgatcagaggctggcaggaacttcaccatgtatttccgctagaagcaatgttcagtattctctaattcattgtttgtggtgactttggggaatataaccaccacagagacaagaatcaactttgaatgtgtcatcccaccacctgctggcttccgttgtttctgatgagaaatcaactgtcaatctcattggagtttccttgtacgcgatgagttgtttttctcttgctgctgccaagagtctctttttgtcttgtttgtttatttatttatttatctaatttatttattttgagatggagtttcacttttgttgcccaggctgagtgcaatggcacaatctcaactcactgcaacctctgcctcccgggttcaagcaattctcctgcctcagcctcctgagtagccaggactacaggtgtgcgccaccatgcccagctaatatttgtatttttttttttaaattttttgagatggagtctcactctgtcccccaggctagagtgcagtggcgtgatcgtggctcactgcaaactctgcttccctggttcaagcgattctcctgcctcagtagctaggattacaggcacatgccaccacacctggctaattttttatttttagtagaggcagggtttcaccatgttggccaggctggtcacgaactcctgacctcaggtgatccatccaccttggcctcccaaagtgctgggattacaggtgtgaaccgctgtgcccagcctaatttttgtatttttggtagagtggagtttcactatgttggccaggctggtctcgaactcctgacctcaggtgatccacctgcctcggcctcccaagggttgggattacaggtgtgagccaccatgcctggcccttggggtctctttttttatgaactgtctgtcccactgggcaaagcctctgagaccctattttggacactggtggagcagtagcctctggttttcgtggcttgcccctcctggcatgggatctctgttccacaagcaagctgggaggagtgtgattatggtcccagtattcttggactgtcactgatggtacagccttcattctatggtgtgggcgagtgctgggtggaggagaagagtgccctacttctttaccacgttcaccagaaatgtagcctcttcaatttggagttggaggggatgaaaactggtggcagcatgctcctcctggtgagatatggtaagccttgattggcagctgaggggagagggagcttgtcttcttggccacatctactcagagagcagtttccttccagctgaactgtggggggagggcagtcaggagatagttggtcctcctggcttaaatgccacagatggcctggcacagtggctcataatgttacaggtagttaaacaggcatgagcagggctggagagggctcttccccacccaccaggaatgtcaagtgatggttcaacaatgatcacattgcctctctaaataatttggcagccagcgccagagagagagacaagctcctgatggtccacagctgttatgttagagtgttaattgaatgcagacaccagggagaagcaatttcctggacatgtgcattaagagacaaaatagtctgggcacggtggctcacacctgtaatcccagcaatttgggagactgaggcgagcggatcacctgaggtcaggagttcaagaccagtctggccaatgtggtgaaacccccatctctactaaaaatacaaaattagccaagcgtggtgttgggtgcctgatatcccacctactcaggagactgaaggaggagaattgcttgaacccaggaggtggaggttgcagtgagctgagatcaggccactacactccagcctgggaaacaagagtgaaactgtctcaaaaaaaaaacaaacaaacaaaaaagaaagagacaaaatgatggagcatgaccttccggggtcagaccaccggaaaagggaagaaaacctcagataggcatgcatacaacttcctacacacactgtgcatgctcaccttcccagggtaaggaggccactgtgcatgcaggcagcccatcctaagggaagaatcatgggaaaggagccagcctataaagtcctaggatcaaggttgaacaccacgcttgaccttggtgcccacttgagtctcttccaaatgtacttacctttctttcccattctaaagccatttaaaataaacttccactcctgctctgaaacttcccttggtctctttttctgccttatgccctgtggttctttcttctgtggaggcaagaattgaggttgctgcagacccgtacagatttgtcaccggtaacttggataacctttcaccgataacaatgcttataatcccagcactttgggaggccgaggtggcaggatagcttgagcccaggaatttgagaccagcttgtgcaacatagtgaaaccccatctctacaaaataataataataaaagtaataaaattcaatgccacagattctccctgttcttactgagttttagtagattttcttgaataagaaagtgagccaagattgcaccactgcactccagcctgggcaacagagcaagactccatctcaataaaaaataaaattaaatgtttattcatctgttatatgacattaggataattccagaaactttaagtgtttatttatttttaaatggttttcaccagctttgcttgttttgctggggaaaagatcctcagagctccggcactgtcatcttagagctttgatgtcccccagtgtattaatccattcttgtattgctataaatacctaagcctggataatttataaaggcaagaggtttaattggctcatggttctgcaggttgtacagggaacatgatgctggcatctgcttggcttctggggaggcctcaggaaacttacaatcatggcagaaggtgaagggagaacaggcatgtcacatggcaggagcaggagcaagagagcaagggaagaggcgccacacactttacttattttatttttattcatttattttgagatggaatctcactttgtcacccaggctggagtgcagtggcactacctcagctcactgcagcctccatctcttggattcaagtgattcttttgcctcagcctcctgagtagttgggactacaggcatgcgccaccactggctttttttttttttttttttttttttagacagagttttgctcccgttgctcaggctagagtgcaatggcaccatcttggctcaccgcaacctccatctcccaggttcaagcgattctcccacctcagctgccaagtagctgggattacaggcatgcgccaccacatccggctaattttgtatttttagtagagacggggtttctccatgttggtcaggctggtatcgaactcttgatctcaggtgatctgcccgcctcggcctcccaaagggctaggattacaggcgcgagccaccgtgcctggccaatttttttttttttttttttagatggagtttcgctctcgttgcctaggctggagtgcaatggtgccatctcggctcactgcaacctccgcctcctgggttcaagcaattctcctgcctcagcctccctagtagctgggattacaggcatgcgccacctcgcctggctaattttgtatttttagtagagatggggtttctccatgttggtcaagctggtctcgaactcctgacctcaggtgatccacctgcctcggcctcctaaatagctgggattacaggcgtgagccaccacatctggcctaatttttgtatttttagtagagacgggcgtttcaccatgttgcccaggctggtctcgaactcctggcctcaagtgatctacccacctcggcctcccaaagtgctgggattacaggtgtgagccactgcgacccgccttcacacacttttaaacaaccagatctcttgagtactcactcactgtcaagagaacagcaccaaagggatggcgctaaaccattcatgagaaaccccacccccatgatccaatcacctcccaccaggccctacctccaacactggggattgcaatacgacatgagatttgggtgggcacacagttctaaaccacatccctcagcttttcctttcaggcttttgggttagtctattgcttgctccaacacctgtctactacttcagacagtctcaaagttaaaaatcctacctgttatccaatgaagtctccctgaaaaaaaatcttgcctgtaaatgtttctgatgaatgcctcctggggagagggccttttgcactgggccagctccagtgaggtcacatacagatggacttgcaagtggagtcttctagggaacctcaagacagctccagtaatgacagttctttggaaacacaactttgaaagaactccagctccgttttactccctcagggggctgccaggttgctctgagaatgtgggctgttattttttaaggttgcaacagagctggaggctgtgggctgggactagggcaatttttttttactttatttatgttacctttcttttttgagacagggtcttgctctgtcgcccaggctggagtgcagtggcacgatctcttctcactgcagtctccacctcctgggttcaagtggttcttctgcctcagcctcacaagtagctgggattacaggtgcacaccaccacgcctggctaacttttgtattttttggtagagatggggtttcaccatgttggccaggctggtttcaaactcctgacctcaagtgatccacctgcctcggcctcccaaagtgctgggattacaggcgctcaagccaccttgcccagccactttttaaaatttcttgaaagccacaacaagatttgcctatccccggtactttccccatttttaaaaatttctcaaaggtggtcttcagtggttccaaaactttatcttagaaactttcagcattttgaggggtggactgcatccaaatctggggtcttgaacatttcagttgagttagtgtcctattatcattctccacttctttggggcttcaatttccactgaagtgtggacctaaaagcattttaatcttgagtgtcattctctttacagaaaacacaggctgggcactgtggctcacgcctgtaatcctagtactttgggaggctgaggcaggcggatcacgaagtcaagagattgagaccatcctggacaacatggtgaaaccctgcctctactaaaaatacaaaaattagctgggcgtagtggcacacgcctgtagtcccaactactcgggaggctgaaacaggagaattgcttgaaaccaggaggcagagaggttgcagtgagccgagatcatgccactgcactccagcctggcgacagagcaaaaatccatctcaaaaaaaaaaaaaaaaaaaaagagagagagagagaaaacacaaaccaggcttgacacagtggctcattcctgtaatcccaggactttaggaggctgagacgggtgaatccttgagcccaggagttttttcttttctttttctttctttttttttttttttttttttttttttttttttttttttgagacggagtctcactctgtcgcccaggctggagtgcagtggtgtgatctcggctcactgcaacctccgcctcctgggttcaagcaattctcctgcctcagcctcccgagtagctgggactacaagcgcatgccaccacgcccagctaatttttttgtatttttagtagagacgaggtttcaccatgttagccaggatggtcttgatctcctgacctcatgatccgctcgcctcggcctcccaaagtgctgggattacaggtgtgagccaccacacccagccaagtttttttcttttcttttctttctttcttttttttttttttttcctaagacggagtctcattctgtcgcccaggctggagtgtaatggtgggaactcaactcactgaggcctctgtctgctaaattcaagcaattctcgtgcttcagcctcccgagtagctgggattataggtgcgtgccaccacgcccggctaatttttgtatgtagagacggggtttcaccctgttggctaggctggttgaactcctgacctcaagtgatctgctcacttcggcttcccaaagtgctgggattacaggcgtgagccactgtgccaggccgagccaagagttcaaaactagcctgggcaacataggaagactccagctctataaataaataaataagctgagcatggcagtgcatgcctgtagtcccagctacttgggaggctgaagtgggaggatccctggagcctggaaggtggaggctgcagtgagctatgattgcaccactgcgctccagcctggggaacagagtgagagagcctgtctcaaaaaaaaaaaagaaaaaagaaagaaaaaagaaaaaagagaaactaaatgaaagtggagagcttctgcttcctcttggtcatctgttcgtattacaacatctaccctaagcaatgggcctatttcttcctttttcttgatccagatatagctatcaaagccctttttgttgtctatagcatgttttgtaatctcagctcattccgagttacagccatcccgacactgttctcataggtttatgctcagcttttgtgtttatccctgggttacgcggctcttcttacatcttcttttattacagaacttcctgtgcagccgctttggctcctataaatgctattccgattgcctcttcatcaggacccaaaagggatgaaggagtggctggttttttggggaggcgggaggaggttggatattcttgaaatgataaataaaatgatacatattagttcagtattggaacacagataaatatttagcacatgcaatgagataattgttcattaatttagcatcctatgattaatttagcatcctaatagtcataggcattgtcttgttcacctcaagtacattaatacacaattacatactgctttttcccttagctttcatttatttacgactgtgtggtaaacgatcctaaaatttagtggcatgaaacaaccaccttttaaaattttttttcaaatgctcgttgattctgtgggtggagtttgggaagggcaaagtgggaaaagctatactctgctctgtgatgtctgagcctcagcctcagatggggtgacccgaacagccaacagtaactctaatggatggggagggaacagccggggctggggatctgcttcgcagatggctgctttagtcacatgcctgttgcctgcgctgcagtggcaggagggtaggctcaggcccaaaggggactgaaaaccacgcagcctgtgtgtaagggggcaacccgtatgcgaaagcacagttggactttttttttttttttttttttgagacaagagtctcactctgtcaccctggctggagtgcagtggtgtgatctcaactcactgcaacctctgcctcctgggttcaagtgattctcctgcctcagcctccgagtagctgccattacaggctcccaccaccacacctggctaatttttgtatttttagtagagatggggtttcaccatgttggccatgatggtctcgaactcctgccctcagaggatccacctgccaaagtgctgggattataggtgtgagccaccatgccaggccttttcttttctttttttctgaggcagggtctcagtctgtcacccaggctggagggcagtggtgcaatctcagctcactgcagtctctacctcctgggctccagcaatcctcccatctcagcctctcaactacaggtgtgcgccactatgcctgtctaactttttttttttttttttttttttgagaaagaatttcgctctccttgcccaggctagagtgcaatggcgtgatctcggcttactgcaacctctgcctcccaggttcaagtgtttctcctgcttcagcttctgagtagctgggattacaggcatgcaccaccatgcctggctaattttgtatttttagtagagacggggtttctccatattggccaggatggtctcaaactcctgacctcaggtgatccgcccgcctcggccttctggctaatttttttacagattttttgtggagactcagtacattgcccaggccggtctggaacttgtgggctcaagtcatcctcccacttatgcctcccaaagttctgggattacaggtgtcagccactgcacctggccggccggccttccttccttccttccttctttccttcctttcctttctttttttgttgagacggagtctcgctctgtcacccaggctggagtgcagtggtgcaatctcagctcactgcaacctctgcctcctaggttcaagcaattttcctgcctcagcctcccaagtagctgggattacaggcgtgcgccactgcgccagctgatttttgtattttcagtagagacagggtttcaccatgttggccaggctggtctcgaactcctgacctcaagtgatctgcccacctcagcctccaaagtgctgggattacaggcatgaatcacggcacctggcctcctggcttttctttttctttgagacaaggtctcactctgtctcccaggctggagtgcagtggtgtgatcattgctcactgcagccttgaactcctgggctgaagcaatcctcccatttcagcccctcaagtggctaggagtacaggtgcatgccaccatatccagctaattttttcaattttttgtaaagatggagtcttatcatgttgcccaggcttgtcttgaactcctgggctcaagtgatcctcccgcctcggcctcccaaagtgctgggattataggcatgagccgctgaagctgggctctataggcgtattatgaaaaaccagggctccttcatgacccatttcctgttccccagaggcaagaacgttccaccgctttggctgggccattggtattgacttccatgtctctaaacagcatgttcatattgtacttgctgatttctcggttttaggcactacctgttatcattttgaaggttgaggctttacaattcttccacctctccccgacagcccacatctctattcctacatatgcacgtgtgcacttcctgttttcattcttccatgtcactgtgcctcggttctgggtacacagatattcagagtctatatcctatagctatgtaaacactgttcacagctgaaccatgccctttccacaaacacttcttccctgcactgtttgttccttctttcccctccaccacactgagttcattatgtcacattttagctgctgtgtttttttgctatgtaacactagttcaatcctgaatgctaccttgagatgtcaatcctttatcacattcaaacatattccattttctattggttttatttcatattattttgttttgttttattttgagatagggtcttgctctgtaccggaggctggagtgcagtggtgcaatcacagctcactgcagcttcagcttcctgggctccaagcagtcctcccacctcagcccccagaatagctgggactacacatgcgtgccactacacccgactaatttttaaattttttgtagagacagggtcttgcaatgttgcccaggctggtcttgaattcctgagctcaagtgatcttcctgcctcagcctcccaatgtgctgggattactggcatcagccacctcgcccagctgcaccatgtatgcatttctaaacaggcttagttcctgcctgttttgggctttataagaacgcactcatggccagacacagtggctcacgcctgtaatcccagcactttcagaggccaaggtggatggatcatgaggtcagaagttcgagaccagcctggccaacatagtgaaaccctgtctctactaaaaatacaaaaattagccgggcatggtcttgcacgcctgtagtcccagctactctggaggctgaggcaggagaatcacttgaacccgggaggcagaggttgtggtgagccgagattgtgccactgcactccagcctgggcaacagagctagactctgtctcaaaaaaaagaatgcactcattgtaggctgggtgtggtagctcacgcctgcacgcctgtaatcccacactttgggaggctgaggcgggtggatcacctgaggtcaggagttagagactagcctggccaacatagtgaaaccccatctctactaaaaatacaaaaattggccaggcgcacatctgtaatcccagcactttgggaggccaaggcaggcggatcatctgaggtcaggagtttgagaccagcctgaccaacatggagaaaccccgtctctactaaaagtacaaaaaattagccgggcgtgatggcacaaggctgtaatcccagctactcgggaggctgaggcaggagaattgcttaaacccagaaggtggaggttgcggtgagccgagattgcaccactgcactccagcttgggtgacagagcaagactccgtctcaaaaaaaaataaataaataaaaagttaattgtgattgtggtagaatacacacaacataaatgtacctttttttttttttttttttttgagacagagtctcgctttcttggccaggctggagtgcagtggcacgatctccactcactgcagcctccatctcccaggctcaagcaattctcctgcctcagcctcccgagtagctgggattacaggtgtgtgccaccacgtccggctaatttttgtatttgtagtagagacagggtttcaccatgctggcctggctggtctggaactcctgacctcaggtgatccacccactttggccttccaaagtgctgggattacagatgtgcgcctggccaatttttgtatttttagtagagatggggtttcaccatgttggccaggctagtctccaactcctgacctcaggtgatccacccgcctcggcctcccaaagtaccatctgagccattttttagtgttcagttcagtggtgttgagtacattcacactgtggtgcaaccaatctccagaactcttcatcttgcaaaactgaaactctgaacccactaaacaacaactcccctctctcccctcccctcagcccctggcaaccatcactctactttctatctctatgactctgactccaggtacctcacataagtggaatcatgcagtatatgtcttttggggacagggttatttcacatagtataatgtcctcaaagttcagccatgttgtagcatgtatcaaaatttcctattttaaaaaaaattctgaataatattccactgtatgtaggtagcacagtttgtttatccattcaccctttcagcctctgtctttattattattattattattttgagacagtcttgctctgttgcccagactggaatgcaatggcgagatctcagctcactgcaacctccgcctcccgggttccagtgattctcctgcctttgcctcctgagtagctgggattacaggtgcccgccaccatatgcctggctaatttttgtatatttagtagagacggggtttcaccatgttgaccaggctggtctcgaactcctgacctcatgacccgcccgcctcggcctcccaaagtgctgggattacaggtgtgagccaccgctcccgaacctgtcttctatattggatgccttcctcaaacgtggtgaatcttgggggtctgtgcatactaaagctggagctattaaaagccttttaaaagttccccaggctgagggcacagtggctcatgcctgcaatcccagcactttgggaggccaagacaggtggatctcttgagtccaggagttcaagaccagcctgggtaacataacaagacctcatcgctacaaaaaataaaaaaataaagctgaccatggtggctcacgcctgtaatctcagcactttgggaggccaaggcgggcgggtcatgaggtcaggagttcgagatctgtctggtcaacatggtgaaaccccatctccattaaaaatacaaaaattagccaggcgtggtggtggatgcctgtaatcccaactactcaggaggctgaggcaagagaatcacttgaacagggaggcagaggttgcagtgagctgagatcgtgcctctgcacttcagccggggcgacagagtaagtctccatctcaaaaaaaaataagaaaaaaaataaatcaggcacggtggtgcacacttgtagtcccagataccaggaaggctgaggtgggaggacgatcgagcccacgagtttgaggttgcagtgagctgtaattgtgctactgcactgcagcctgggtgacagagtgagacccaatctcaaaaacaaacaaacaaacaaaaaaaaaacctctctccactgtgtggcactgtgtgctagggggtgaccttgctggtggcttcccagggagctcctgatgtcagtgtcttcaggactttcctcttggcttgatcacagtcccttcagaagattcttccaattcctgcctgaaggtgccaatttctatgtcttttgtggcttctgcaaagaaaacctagcaatttctcattttttccaatgccagctcgattccacttccttggttctagtaaattggttaccatgagtccctctattagtacctggcttaaacatttttgttcgtattgtcttctttcctattcttactcttcctgtgggtgtgtggcattagaaagattctcttactgccattttattatgtttggggcaagaacagaagtaaatacatgtgtttagtctactatctttaacctgatgccttttaacttttttttttttttgaggtggagttttactcttgtcacctaggctggagtgcaatggtgtgatcttggctcactgcaacctctgcctcctgggttcaagcgattctcctgcctcagcctcccgagtagctggggttacaggcgcctgccaccatgcctggctaattttttttttttttttagtagagacagggtttcaccatgttggccaggctggtcttgaactcctggcctcaggtgatttgcccgcctcggcctcccaaggtgctgggattataagcgtgagccactgtgcctggccccttctaactttttaaaagtaaaccttgtcttggttaggcatggtggctcatgtctgtaatcacaaaattttgggaggctaaggcaggaggattgcttgaggccaggagttagagaccagcctgggcaacagagtgagactgtctctacataaaatttaaaaaaatagccaggtgtggtggtacatgcctatagtcccagtgctttgggaggccaaggcaggaggatcacttgaacctaggaattcaaggccacagtgagctgtgattgcaccactgcattccagcctgggtaacagagcaagaccctgtcttgaaggaaaaaaaaagagttgtcatattcttaccacatcattatccacattatccacaaagcaaagatatggaatcaacctaagtatctatcaatggaggagtggataaatcaactatggtatgtatacagaatggaatactatttgactataaaacagaattaggctgggcatgatggcccacacctgtaatcctagcacattgggaggcgaacacaggtggattgcttcagcccaggagttcgagaccagcatggccaacatggagaaaccccacctctactggaaaaaaaaaaaaattagccaggcgtggtggcaggtgcctataatccctgctacttcagagactgaggcaagagaattgcttgaacctgggaagcagaggttgcactgagccaagatcactgcactccagcctgggccacagagcaacactcagtctcaaaaaaaaaaaaaaaagttttaatatctgatagcagagtagggtgattatagttggctgcaatgaattgtatatttcaaagtaactagaagagaacttgaattactcccaacccataggaatgagaaatactcaaggtgatgagtaccccagataccctggcttgatcattacacattctatgcatgtaacaaatactctcatggaccccataagcatggtgtatatatatatgacatatatgatatatcatatgcaacacatattatatcatatatgatataatatatgtgatatatcatatatgatatataatatatgtgatatatcatatatcatatataatatatgcgatatatcatatatcatatataatatatgtgatatatatcacatataatatatgtgatatattatgtatcacatataatatatgtgatatattatgtatcatatataatatatgtgatatattatgtatcatatataatatatgtggtatattatgtatcatatataatatatgtggtatatgtgatatatattatatatgatatgtgtgatatattatataatatatgtgatatattatatatgtgagatatatataatatatatatttcttttttagacagcatcttgttctgttgcccaggctggagtgcaattgcacaatcttggctcactgcaacctccgcctcctggtttcaagcaattctcctgccttagcctcccgagtagctgggattacaggcgaccgccaccacacccagctaattttagtatttttaatagagatggggtttcaccatattggtcaggctggttttgaattcctgatgttaggtgatccacctgctttggcctctcaaagtgctgggattacaggtgtgagccactgcgcctggcctggaatacattatgtatcaataaaaaaaaacaggagttgtgtggagaacaattggagcagcagatggcaaagaagaccttgagggctgggataagaagactggattttctgctagaaggaatgagagcattttatcatgttagtcagcttcagagccttgcagtaaaaacatttgcacatttgaatgttgatgaagacatttacaaatatagacaggatgtgataatttgtacttttccctcatccccggttggtgtgagtgatgtcattgattgcaccagttaacaggtgaaaaaatagaagtttgggatgtcaggattgtacctgatgcttgagcatcataggtggatgtgaaggaaaaggaaaacatgatcaagggctgagcaatctgggccacaggaatatcaaactcatttaccaatgtgtgcagccacccttaggctgcatgacagattgaggacagagcttatctgggcactcattaattgaaaggaggagatcagtgagaagaagtagagaaaacaaactacttgtcagttcaaacttaatcactttgttttttgagacagagtctcgcactttcgcccaggctggagtgcagtggcatgatctcggctcactgcaagctccgcctcccgggttcatgccattctcctgcctcagcctcctgaatagctgggactacaggcacccgccaccacgcccggctaattttttgtatttttagtagagacggggtttcgccgtgttaaccaggatggtctcgatctcctgaccccgtgatcccccgacctcggcctcccaaagtgctaggattacaggtgtgagcccccgcgcccggtcttttttttttttttttttttgagacaaagtcttgctctgttgtccaggctggagtgcagtggcatgatgtcagctcactgcaacctctgcctgtggggttcaagagattctcctgcctcagcctcccaagtacctgggattataggcacccgccaccacacccgactaatttttgtatttttagtagagacagggtttcacatgttggccaggctggtctccaactcctgacctcaggtgatccacctgccttggcctcccaaagtgctgggattacaggtgtgagccaccacgtccagctttttttttttttttttgagatgtagtcttgctctgtcacccaggctggagtgcagtggctcaatctatgttcactgcaacctccgcctcctaggttcaagtgattctcctgcctcaaactcctgagtggctgggattacaggtgcgtgacaccacgcccagctaatttttgtatttttagtagagagagggttttaccatgttggccaggctggtctcaaattcctggcctcaggtgatctgcccggctcaggctcccaaagggctgcgaatccaggcgtgagccaccgtgcccggcccggtttatattttagaagggtaatacagtaagttgacagtaagagagcccttatctcttttcttttccttttttgttctcctttcatattccatcattgaaaggtaggaacatacagcataacttaaaattaggaacagagttcacatataactttttttttttttttttttgagatggagtcttgctctgtcaccaggctggagtgcagtggcgcaatcttggctcactgcaacctctgcctcccaggttcaagcaattcttctgcctcagcctcttgagtagctgggactacaggcacgtgccaccacacccagctaattttttttgtatttttagtagagacgcggtttcatcatgttggtgaggctggactcgatctcctgatcttgggatccacccgccttggcttcccaaaatgctgggattacaggcatgaaccaccacacccagccaccttttttttttttttctttttctttttgaagacagaatcttgctctgttgcccaagctggagtgcagtggcgcaatctcagctcaatgtagcccccacctcctgggttcaagtgagtctcctgcctcaggctcccgagcagctgggattacaggcatccgccatcacacctggctaatttttgtatttttagtacagacgaggtttcaccatgttggtcaggctggtctcgaactcctgacctcaagtgatccgcccgcctcagcctctcaaagtgctaggattactggtgtgagccactgcgcctggcccatataacctttttaaaaaataacagctttattggaatataaaacatacaccattaagtttaccctttcaaagtgtacagtttggtgggtttggtttttagttgattcacaaagttcatctgtcaccactatgtaattccaaaatattttcaccccaggaagaaactctatactaattggcagccactccctgtcccctccctactccccaagtccctggcaaccactaatctaattattgtctccatggatttgcctattctggacagaccacatgtaaagtttttgcttaatctgattaattgataggttccacttttacagataaatagcttttcatgtcagcaaaaatgaaagatttaaaatgtagtactaggctggtcacagtggctcacgcctgtaatcctaacactttgggaggccaagctaggtggatcacttgagctcaggcattcaacaccagcttgagcaacatggcaaaacccggtctctacaacaaatacaaaaaattagccgggtgtggtggtgcatgcctgtgctctcagctcccagctacttgggaagctgaggtgggaggatcacttgaccctgggaggcagagattgcagtgagccaagatcacactactgcattccagcctgggcaacagagtgagaccccatctcaaaaaaaaaaaaaatatatatatatatatatgtagtacctgacctcccccaaagttatttgaggttcaaatgatttatttcagcctccacttaactagagctgacctcttattagacaccttggggacattactatgagccttaaagaaataaaaagtattataaaggaatacaataaatagttgtatgccaattaattaaacaacttagaaaaatggacaaagtcctagaaaaacaagaaaaacctaccaaatttcaggaagaaatggaaattctgaatagacatataacaagtaaatagattgaagtagtaataaaaaacttcccacaggttggcgtggtggctcatgcctgtaatcccagcactttgggaggccgaggtgggcagaccacgaggtcaagagatcaagactatcctggctaacaccgtaaaaccccgtctctactaaaaaaaaattagccaggcattgtggtgggtgcctgtagtcccagctacatgggaagctgaggcaggagaatggtgtgaacccaggaggtggagcttgcagtgagatgagatcgtgccactgcactccagcctgggcaacagagcgagactccctctcgagagaaaaaacaaaaacaaaaacaaaaacttccacaaaggctcatgcccacagggcttcactgctgtatttaactaaacatttagagaaaaattaataccagtttttcataaactctttcaaaaaatagaagaagaggcaacatttcccaactctttttatgaggccagtattaccctgatgccaaagccagacataagaaaggaaactacagatcagtatttcttattaatatagaggcaaaaatcttcaaataccagcagacagaatccagcaccacatcaaaaggacagtacaccatgatcaagtgcgaatgatcccaggaatgcaaggctggttcaatatctgaaaatacattaacttaatacaccataattttagaataaatggaaaaaagcaattaatcatctcaataaatgcagaaaaaaactttgacaaaattcaacattctttcgtaagaaaaaaaccatgcaacaaactacaagtaaaagacaacttcctctacctgataaagagcatctgtgaaaaacccacagctgacatcatacttaatggtgaaagttcctgacagatcaaaataagacaaggaagtccgctcttaccacttttattctgtattgtactggagattctagccaggaaaattaagcaagaaagtgaaataaaaggcatctagattggaaagaaagaagtgaaactatctatagattacatgatcttgtatatagaaaatatacaagatccaaggccgggcgtggtggcttatgcctgtaatgccagcatttgggaggccaaagtgggcagatcatttgagatcagcagtttgagaccagcctggcaaacatggtgaaactccgtctctactaaaaatacaaaaaattagctgggcatggtggtgcacacctgtaatcccagctactcagagtctgaggcaggagaatcccttgaagctggtaggcagagtttgcagtgagctgagatcgtgccactgcactccagcctgggtgacagagtcagactctgtctcaaacaaaacaaaacaaaaacaaaaaaagaaaatatataagatcctgtaaatcctaaggaacccactaaaaaatcagaactttaatcgccagggaaatgcaaatcaaaacctctgaagaaaaaacacaaactgttttttttcttggctctcacaccacagtaacaatcactacagaagtcttctgtgaccgggctgggtgcggtggctcacatctgtaatcccagcactttgggaggccaaggtgggtggatcacgaggtcaggagttcaagaacagcctgaccaacgtggtgaaaacctatctctactaaaaacacaaaaagaatagccaggtgtggtggcaggcacctgtaatcccagctactggggaggctgaggcaggagaaatgcttgaaccagggaagcagaggttgcagtgagcagagatcacaccactgaactccagcctgggcaacagagtgagacttggtctcaaaaaaaaaagaaaagaaaaggaaaagaaaaaagaaaaaaaaaagaagtcttctgtgaccaaatgttggggggaactcctgccaacaccaagcaaacaaccaattctccaatggacaattctgaattgagtgtcctccaattcaattccaacactatctacctgaagatagcatcagatcccacaagttgagggttcaatcccacaagactgcacccctacacacaccagaacttctgaccgactggcttcaaattggggtttccatgattccctcttttttttttttttttttttttttttttgagacagagtctcctctgccacccatgctggagtgcagtggcagagatctcagctcactgcaagctccgcctcccaggttcatgccgttctcctgcctcagcctcctgagtagctgggactacaggtgcatgccacaacgcccagctaattttttgtatttttagtagagatggggtttcactgtgttagccagagatggtttcgatctcctgacctcgtgatccgtccgcctcggccttccaaagtgctggggttacaggcatgagccaccatgtctggcacagctctctctttagtgagagtggggacttctgagaggaaaagaccagcaggtgggggatgtgccatattttatagtcagatttgaggatgtggtgcctgatttacataggactcacagattggtttgatcaagagtgatattacatagcatgcagggaaggctggctgcctcaccctaatcatattatgcaaatgaactttccccttggccttcgccatcttgtctgctctttactgtacacgtggctgacaaagagaagggaagatggagccaccatcttgaacatgattggcacaactgccaacatctatgtctgcagctcgattttacaggctactcttcgttagaaaggaaaataatttggggctgcttttcattaaaaggagaaccttaccaaagacttctgtacccttactatctgcctaagtaatttcttcttaactcctgtatgacctccacatggtcagctatccggaagctccctaagccctgtccttttggccttttatggagacttaattggataggcatgactcaagcatggacaaatgtgtagaaaggtgattggtcaaaaagggcacgatctaatactaataccctgaatggggaaccccagcaaggcccttgtgttcagcaactccttggcctctctgtgcagctttccttcctccagggtatgggcaggagtcctaccgaaatgaaggtgtcatcaactacactcagacaaggtatgtcagagagtttctttatggccaatttcaatacagaaaggtaggggaagattcctgccttggtgagaaaaagaagcaggtgaaaggagagcaggagaaggtcaaacagagagagagagtttttttttttttttttgagacggattcttgctctgttgctcaggctagagtgcagtgatctccgctcacactaacctccgcctcccaggttcaagcgattctcctgcttcagcctcctaactgggactacaggcgcccgccaccacacctggctaatttttgtatttgtagtaaagacggggtttcaccatgttggccaggctggtcttgaactcccgacctcgtgattcacccaccttggcctcccaaagagctgggattacaggcatgagccaccacacccagccaagagattcttttttcaatgaggcctgcttcagaggattgcagcactccagcattctagcaagagctatgggagctgtgaaccaggaactgtggacaaaatctagatgtatatatatatatatcaccaaatcacaatgaggtgctgcctcatacctgttacgatggccactatagaaaacaaaaacaaaaaacaccaaaaccagaaaatacgtgtggcaagaatgagagcgaattggaaaccccgtgcactgttggtgggaatgtaaaatggtacagctaatgtggaaaactgtgtgaaagttcctcaaaatattaaaaatagaactaccatatgatccagcagtcccacttttgggtatttatttatttatttatttatttatttatttatttatttttgagacggagcttcgctcttgtcacccagaatggagtacaatggtgcgatcttggctcacaggaacctccgcctcctgggttcatgcgattcttgtgccttggtctctcaagcagctgggactacaggggtgtgctatcacgtccagctaatttgtgtgtgtgtgtgtgtgtgtgtgtgtgtctgtgtatgttttttgagacagagtctcactctgtcgcccaggctggagtgcagtggtgtgatcttggctcattacaacctccatcttccgggttcaagtgattctcctgcctcagcctcctgagtagctgggattacaggcatctgccaccatgcagactaatttttatatttttagtagagacggggtttcaccatgttggccaagctggtctcaaactcctgacctcaggtcatccacccacctcagcctcccaaagtgctgggattacaggcatgagccatgtgcccggcctaatttttgtgttttcagtagagacagggtttcaccatgtcagccaggctggtcttgaactcctgacctcaagtgatccacacacctcagcctcccaaagtgctgggattacaggcatgagccacgtgcccggcctaatttttgtgttttcagtagagacagggtttcaccatgtcagccaggctggtcttgaactcctgacctcaagtgatccacccacctcggcctcccaaagtgctggaattacaggtgtgagccactgcgcctggccacttctgggtatttatccaaaagaattgaaatcagaatctcaaagagatatctgcattcccatgttcatttcagtattatttacaataatcaagaggtgtacacaacctaaatgtccactaacagatgaatggataaagaaaatgtgaggccaaggtgggcggatcacgaggtcaggagattgagaccatcctggctaacacggtgaaaccccatctctactaaaaatacaaaaaattagccaggtgtggtggcgggcgcctgtagtcccagctactcaggaggctgaggcaggagaatggcgtgaacccgggaggtggagcttgcagtgagctgagattgcgccactgcgctccagcctgggtgatggagcaagattccatctcaaaaaaaaagaaagaaagaaagaaagaaaatgtggcacagacatacaatggaatattattcagctgtaaaaaggaggaaatcttgtcatatgctacaacacagatgaaccctgaagactgatacagtttcgatgtgtgtctctgcccaaatctcttgtagaaatgcaatccccaatgttggaggtggggcctgtggggaagtgtttggatcacgggggcagatccctcataaatggcttgcgccatctccttagcaataagtgagcccttactctgagttcacacgagatctgactctttaaaagttagtggcacccctcctcaccctctcgctgtcttgctcctgttttcgccatgacatgcctgctccccattcgccttctgccatgattttaagtttcctggggcctccccagaagccaagcagatgccagcaccatgcttcctgtacagcctgcagaaccatgagccaattaaacctcttttcaccgtaaattacccagtctccggcatttctttatagcaaagcaagaatggcttaagacaaagacattatactaagtgaaataaaccagttatagaaggacaaaaactgcatgattccactcatacgaggtatctaaagtagtcaaactcaccaaaacaaaaattagaaaggtgatgttcagcagctgaggggagggggagaggaggagttgctgtttattgggtatcgagtttcagtcatgcaaaatgaaaaattttagaatctgctgcactacgttgtgatcgtagtttaaagtactgtacacttaaaacttgctcgggtccaggtgtggtagctcatgcctgtaatcccagcacgttaggaggccgaggcgggcggatcacgaggtcaggagatcgagaccatcctggccaacatggcaaaaccccgtctctactaaaaaataaataaataaaaattagctggggatggttgcgtggcatggaggctgaggcaggagaattgccggaacccgggaggcagaggccacagtgagccaagatcgtgccactgccccctagcctgggcgacagagtaagactccatcaaaagcaaacaaacaaacaaaaatcaacaacaaaaacttgctaggagggtacatctcatgttatatgttttatcacaataagaaaataaaactggccaggcacagtggctcacacctgtaatcccagcactttgggaggctgagatggaaggatctcttgagcccaggagtacgagaccatcctgggcaacaccgtgaaacccccgtctcgacaaaaataaacaaaatcagctgggcatggtggtgcatgcatgtggtctcagctatttgggaggctgaagagagagaattacttgagcctgggaggttgaggctgcagtaagccaagatcgcaccactgtactcctgcctgggcaatagagatagacactgtctaaaaaaaaaaaaaaaaaaaggccaaggtcaggtgaggtggctcatgcctgtaatcctagcactttgagaggccaaggtgggtgggtcacctgaggtcaggagatggaggccagcttggccaacatggtgaaactccatctctactaaaaaaatacaaaaatgagctaggcgtggtggcacgcacctataatcccagctactgaggaggctgaggcaggagaattgcttgaacatggggtgcggaggttgcagtgagccgacatcatgccacttcactccagcctgtgtgacagagcgagactccatctgaaaaacaaaaaacaaaaaacaaactaattaatgaaaacagtaatgttgcaagatataggtcaatatgcaaaaaaaaaatcaattatatttccatataattgcaatggacaggtcaggcacgtttgctcacagctgtaatcccagcactttgggaggccaaggcgggcagatcacttgaggtcaggagttcgagaccagcctggccaacatgatgaaatcccatctctactaataatacaaaaacaaacaaacaaaaaaattagccaggcatggtggtcggcacctgcaatcccaactactagagaggctgaggcaggagaatagcttgaatctgagaggtggaggttgtggtgagccgagaatgcaccattgcactccagcctgggcgacaagagtgacatttcatctcaaaaaaaaaaaaaaaaaaaaaagccgggtgtggtggctcatgcctgtaatcccagaactttgggaggctgaggtgggtggatcacgaggtcaggagatagagaccatcctggccaacatggtgaaaccccgtctctactaaaaatacaaaaaaattagctgggtgtggtggcgcatgcctgtaatcccagctactcaggaggctgaggcaggagaatcgcttgaaccagggagttggaggttgcaatgagctgagatcgtgccactgcactccagcctggtgacagagcgagaccccgtctcaaaaaaaaaaaaaaaaatgcaatgaacaatttctgaaaacgaaattaagaaaacaattccatttacaatagcacccccaaaataaaatacttaagaataaacttaacaaaaggagtacaaaatgtatgctctgaaaccttgaaataattgttgaaacaaatcaaagaagatttgatttctaagtaaatggaaagataccccacattcatggatcagaagatttaatattgttaaattaatctacccaatccctattggaattccagtgacttccttgtagaaattgacaaatgggtcctaaaattcatatggaaactcaggggactcagaatagccaaaacaatcttgaaaaagaaacaagttgaaggctcacacttcccaatttcaaaacttactacaaagctacagtaatcaagacactgtgatactgtcatagggctagacccatagatcaatgatctatagagtccatggctggatgtggtggctcacagctataatcccagcactttgggaggctgaggtgggtggatcacttgaggtcaggagttcgagaccagcctggccaacatggtgaaaccccatctctactaaaaatacaaaaattagccaggtgtggaggtgggcacctgtagtcccagctacatgggaggctgaggcaggagaatcacttgaaccctgagtgacagactctgcctcaaaaaaaaaaaaatctagagtccagaaataaacctatatgtctgtggtcaatttattttaaataagggtgccaagacaattcaatgagggaaagaatagtctttaaataaacagtgctatgtaacagtgaacatgtacaaaacatacacatacaaaataatgaacttgactgggcatggttgctcatgcctgtaatcccagcactttgggagcccgaggtgggtggatcacttgaccccaggagtttgagactagcctgaacaacatagtgaaactcctgtcccacaaaaaatacaaaaagataagcaaggcatggtggtgtgtgcctgtagtcccaactacttaggagactgaggtgggaggatcacctgagcccaagagttcaaggctgcagtgagttgtgatcacaccactgcactccagcctgggcagcagagtaagatcctgtttcaaaaaataataaataaataaggaatgtggagcccctgcctcataccatatacaaaaattaactcaaaatagggttgttgttgttttaaaaccaaatgtaaaagctaaaactataaaactcttagaagaaaacatagggacaagtctttgtagcttcaaatttggcagtgtcttttttttttttttttgagacggagtcttgctctgttgcccaggctggagtgcagcagcacaatctcggttcactgcaagctcggcctcccaggttcacaccattctcctgcctcagcctcccgagtagctgggactacaggcgcccaccaccacacccggctaattttttgtgtatttagtagaaacggggtttcaccatgttagccaggatgttctccatctcctgacgttgtgatccgggtgcctcggcctcccaaagtgctgggattacaggcatgagccaccgcacccatcccggcagtgtcttcttagacatgtcaacaaaaaggaaagcaacaacaatgaaaacagatacattgggcttcatcaaaatgtgaaacttataacatacactggggcctgtcggggggtcgggggagcaagagcattaggataaagctaatgtattcagggcttaatacataagtgatgggttgataggtgcagcaaagcaccatggcacacgtttacctatgtaacaaacctgtacatcctgcacgtgtatcccaggatttaaaataaaatatagaaaatactcaacaatcataataagtgtaaaagaattttggtcgggcgcagtggctcacgcctgtaatcccagcactttgggaggccaaggcaggtggatcacgaggtcaggagatccagaccatcctgactaacacggcaaaaccctgtctctactaaaaatacaaaaataaaataaaataaaataaaaataaataaaaataaaaattagcggggtgtggtggctggtgcctgtagtcccagctactcaggaggctgaggcaggagaatggtgtgaacccaggaggcggagcttgcagtgagccgagatcgtgccactgcattccagactgggggacagagtgagactctgtctcaaaaaaaaaaaaaaaaaaaagaatttgaaacaaaaacgtgaaacttctgtgattcaaagaacaccgtcaagaaagtgaaaaaacgcctgcctgcccgcctttctttctctctctctctctctttctttctttcaacagtctccctctgttgccgaggctggactatactgccgtgatctcggctcgctgcaacctccctgcctcaggctcctgtgattctcctgcctcggcctgccgagtgcctgggattgcaggcatgcgccgccacgcctgactggtttttgtatttttggtggagacggggtttcgccgtgttggccgggctggtctccagctcctgaccttgagtgatctgcccgtctcagcctcctgaggtgctgggattgcagacggagtctcgctcactcaatgctcaatgttgcccaggctggagtgcagtggcgtgatctcggctcgctaaaacctccacctcccagccgcctgccttggcctcctaaagtgctaagattacagcctctgcccggccgccaccccgtctgggaagtgaggagcgcttctgcccggccgccaccccgtctgtgctgggtgtggtggtgggcgcctgtagtcccagctttttggaaggctgaggcaggagaatcgcttgaacccaggaggcggaggttgctgtgagctgagattacaccactgcactccagcctgggcgacagagcaagactccatcttaaaaaaaaaaaaaggccgggcacagtggctcacgcctctaatcccagcactttgggaggacaaggcaggtggatcacgaggtcaggagattgagatcatcctggctaacacgatgaaaccccgtctctactaaaaatacaaaaaattagccgggcctggtggcaggcacctgtagtaccagctacttgggaggctgaggcaggagaatgacgtgaacctgggaggcggagctggaagtgagccaagatcgtgccactgcactccagcctgggcgacaaagcgaaactccatctcagaaaaaaaaaaaaaaaagtaagaaaagaaaaaaagaaatgtaaaatagtaaacagaaatatctcccagctcttaaaattaggcaattctgttggaaaggacataactctgaatagaggttataaggaagagtttggatttaacaggagagtgccaagaagctcttccagtttacaaagcaggagagtatcattaagcctgtgttttagaagatgactgcattctgtgattctgaaatagctatatataggttgctcgtgaaatctgtgctgctagtcttcttttttttttttttgagacagaatcttgctctgtcccccaagctggagtgcagtggcacgatctcagctcactgcaacctccgcttcctgggttcaagcaattctcctgtcttggtctcctgagtagctgggattacaggagtgcaccaccacgcccagctaatttttgtatttttaatagagaaagggtttccctgtgttgaccaggctggtcttaaactcctgacctcaggtgatctgcccgcctcggccttccaaagtgctgggattacaggcgtgagccactgtgcccggcgtcgctagtcttctcttactgaagtgaaactcacctctattctttttttttttctttttctgtttttgagacagagtctcagtctgtcacccaggctggagtgcagtagctcgatctcggctcactgcagccttcacctcctgggttcaagtgattctcctgcctcagcctcccaagtagctgggattataggagtgcatcaccacgcccagataattttttttttgtatttttagtacaggtggggtttcaccatgttggccaggctggttttgaactcctgacctcaaatgatccaccggcctcggcctcccaaagtgctgggattacaggtgtgagccatagtacccagccagaaataaatttattgactgatataaattaaaattcctgtgtatagctggcttcaggaaagcctgaataggtgttcaaagaatgtcatcaggaacttgtctcaccaatcccttacctgtgttagcttcaattaaaaaaacatatttttgggccgggcgcagtggctcacacctgtaatcctagcactttaggaggccgaggtgggtggatcacctgagatcaggagtttgagaccagcctggccaacatgatgaaaccgtctctactaaaaacataaaaattatcgggcgtggtggtgcataaccgggcatggtggtgcatgcctgtaatctcagctactcgggaagccgagggagaattgcttgcatctgggaggcagaggttgcagtgagctgagatcgcaacattgcattccagcctgggcaacaagagtgagactccatctcaaaaaaaaaccaaaaaacaaaaacaaaaaacatttttttaagagacagtttcactctgtcgcccagagctgggtccagtagtgcaatcacagctcactctaacctcaaagtcctggactcaggcattcctcctgtcccagcctcccgagtcactgagactataggcaagcaccagcacgcctggttactttttttttttgaaacagggtctccctctgttgcctatggtggtatgcagtggtgcaatcatggttcattagagcctcaatctccgaggctcgagcaattttcccgtgtcagcctccaaagtagttgggactacaggtaagtgccacaatgtccagctaatttttttttctttttattgagacggagtctcgctctgttgcccaggctggagtgcagtggtgcaatctcggctacaacctccgcctcccgggttcaagcgattctcctgccttagcctccgaagtagctgggactacatgcgcgtgccaccacgcccggctaattttttgtatttttattagagacggggtttcaccgtgttagccaggatggtctcgatctcctgacctcatgatccacctgcctcggcctcccaaagtgctgggattacaggcatgagcctccatgcctggcctgtccagctaatttttaaattttttgttttagggatgaggtcttgctatgttgcccaggctggtcttgaaatcctggcctcaagtgattctcccctggcctcccaaagtgctgggattacagatgtgaaccactgcgcccggctgttagcttcattttcaggcagcctcttctttctgccattttgccgaccagagtcgaaagaaatctcatccctaaaagttcctgcaatggtgcttgggaagaatctcattggtctacagtaggtcataaattcttctgtaaactaatcaccatggggaagaggaggtaaggtatgttctgctcggccagggtaatagcagtgggaacagaggatggactggccaggaaataacatggtggaggcagagtatgcaagtgctcattgcttagcagtgttgggaaagaaagaggattttatctattgaatgccagccatgtgttggccactgtgctgggcaaatgcaactcattttgaaggccagacatggtgtggctcatacctgtaaccccagcactctgggaggctgaagcaggaggatcacttgaggccaggagtttgagaccatcctgggtgacacagtgagatctcatctacaaaaaatgaaaaattagctaggtccagtggctcgtgcctgtgggcccacctcctggggagactgtggcaggaggaggattgcttgagcctgggatgtcaaggctgcaatgaaccataatcacaccactgcaccccagccaaggcgacagagcaagatcctgtctcaaagaaacagacaacaactcagtctgtggaagagggggacatataaacaatgactatccaatgtaccagttacaatgattgaggtatacagcaagggccactaacacaaaacagaaaggaaagcatttgggcagtgactgtgggtcaggggagaggcagttcccagagaaggaaatcttgacttgagttttatttatttattttaatttttatatttttgagatggagtctcactctgtcacccaggctggagtacagtggtgcgatctcggctcgccgagccaccacacctcgccaggtttcaagggataagtaggatacatgaaagtttggtaggaaacaaagagtaagagatttcaggcccaggctgggcacggtggctcacacctgtaatcccagctctttgggaggctgaggcagatagcttgagttcaggagttcgagacaagcctgggcaacatggcaagaccctgtctctaaaaaatatataaattaaaaataaattcaggccaggcgcagtgactcacatctgtaatcccagcacttagggaggccaaggtgggtggatcatttgaggtcaggaggttgagaccagcctgaccaacgtgatgaaattctatctctaccaaaaaattaaaaaattagtcaggtgtgatggtgcatatctgtagtcccaggtacttgggtggctgaggcaggagaatcacttgaaccagggaggtggaggttgcagtgagccgagatggtgccactgcactccagcctgggtgacagagcaagactctgtctcaaaaataaataaataaattaattttaaaaaagagatttcaggcccatgtcaagggcaaagaacagagtcaaaaaagaaaaattgctggccagggcagggcctggtggctcatgcctataatcttagcagtttggtaggctgcggtgggagcatcacttgaggccaggagtttcagaccagcctgggcaacatagcaaatccctgtctctatttctttaaaaaaaaaaaaaaaaatctggccagaaaaaccacatccaaaccaaagacatatttagttttgctcgcacaacatttttagaaatttttgaattagttgccaacattgaaagatctagagctttcacataaaaatccatatttctactttatcttgaaaagccaagtttggctacacagggccagcatttcttcatggtgacaagtggctggcaccaccacagcccctccactccctgttctggttcacccgccctgcctcagatgctcatgttacctgcacagtcctctctagtgaatgaaagacggctgccaatcctttgtaaatttccacatcaaaagaagttggctgggtgtggtggctcacacctttaatcccggcactttgggaggcaaaggtggatggatcacctgagctcaggggtttgagaccagcctggccaatatggtgaaaccccatctgttgccaaaaagagtggtttgtttgtttgtttgtttatttgtgtatagacagggtctcactctattacccaggctggagtgcagtggtgtgatcatagctcactgcagacttgacctcttgggctcaagcgatcctcccacctcagcctcccaagcagctggaactataggcacacgccacctatagtctggctaatttttaaatatttttagagacaagggtcttactttgttgcccaggctggtcttgaactcctggccctaagtgatcctcctgccttggcctcccaaaatgctgggattagaggtgtgagccactgcacccagcccgctaactttttatattattcgttgagttaggatctctctgtgttgcccaggctagtcttgaactcctgggctcaagaaatcctcctgccttggcccctcaaagtgctgggattacaggtgtgagccaccacactggagccattatttattattattttgtttgtttgtttgttttgaaacagggttgcactttgttgcccaggttggagtacagcagtgtgatgttggctcactgcaacctctgcctccctggttcaagcaatcctcccacctcagcctcctgagtagctgggacaacaggtgcatgcccagctaattttgtatattttttgtagacacaaggttgcaccatattgcccaggcagttcttgaacttctgagctcaactgatccacccgccttggcctcccaaagtgctatgattataggtgtgagccactgcacctggccaaattgacaaccattttgttatttctcattattctgggattttgagcagaagcatcctgagaaaggaagcaaaaccttttagtctactgaaaggataggcctgtaattgtcacagaataacttctaccacattctatcagttaagcagtcatgggagctgggtgtggtggctcatgcctgtaatctcagcactttgggaggctgaggtgggcggatcgcctgaggtcaggagtttcagaccagcctggccaacatggtgaaaccccatctctactaaaaatacaaaaattagccagctgtggtggcgtgtgcctgtaaccccagctactcaggaggctgaggcacgagaatcgcttgaacccaagaggtggaggttgcagtgagctgagattgtgccactgcactccagcctgagtgatggaacaagactctgtttcaaataagtaagtgagtaagtaagtaagtaagtaagtaaataaataaataaaagatggatcagaagaaggtgagatggcctgcagattacttagggggttcctgcaatggtagaagcaactcaactcaggtagtgtcggtagtgatgaagagaaaaggggagattcaaggtcaagactcctcactccaggaggccctccctggggttctaatgggacatgcaggtcagaaccaggaaacacagagacaggtttgtacctcagagacaggctgagagtcatcagagtttgcaattgaagctgcctatgtggataagatagtgtggggagtttgagtgcaataagaagagatggaggtgcgggactcacgtctgtaatcccagcactttgggaggctgagatgggtgggttgcttagggccaggagtttaagaccagcctgggcaacattatgggaccccccccgcctctccaaaaaccagaagtattagccaggcatggtgttgcacgcctttagtcccagcactttgggaggctgaggcaggaggatcgcctgagcccaggactttgaggctgcagtgagctgtaattgcacccctgcactccagcctgggtgacagaacaagaccctgaatctaaataagtaactaagaggtggagtcctgggaggactctgggtgtaatgagtaaagcagaggaagagacaccccacaggggattgacagagaaagccatagagaaagatgagaacaaggggagggtgcgtcgtcgcatattcgaaaggaacatgttcaaggaggaggcatagtcagtagcattggatggacaccaaaacgtgtttgcctgatttgatgaccaggaagttactggtggccctgctgagggcaaatcttttttttttttttttttaatggagtttcgctctgtcacccaggctggagtgcaatggctcaatctcggctcactgcaacctctgtctcccgggttcaagcgattctcctgcctcagcctccccagtagctgggattacaggtgtgcgccaccacacccagctaatttttgtgtttttagtagagatggggtttcaccatgttggccagggtggtcttgaactcctgacctcaggtgatctgcctgcctcagcctcccaaagtgttgggataacaggcgtgagccaccgggcctggctggtgagggcaaatatatgtggaatggcgagggcagaagacagactcaagtaggtggaaaagtaggaaatgaggaagtggagacagtgagtgtccaccactctctcaagaaactcacatgtgaacaataggagtgaaatagggaagtggtttgaggttgccaagttgagagaggttccccctgcacacaggaacctgggtgtgttttatatcctgaaaagagagggtctgcagagagaggcctgccagtagaggagaaaagggtgaaacgatgaggtgagatcactgaagaaatgggaggaatgtgtcccaagagggatcggccttgggcccaatgagaaccattactttaaaaacatttttttagagacagggtctccttctgtcatccaggctggaatgcagtggcgcaatcatagttcactgaagcctccaactcctgggctcaagggatcctcctgcttcagcctcccgagtagttaggactacaggcacatgccatcacacgtggctaatattttattttatttatttatttatttatttgagacagagtttcgctcttgctgcccaggctggagtgcaatggtacaatctcagctcattgcaacctccgcctcccgggttcaagcaattctcctgcctcagcctcccaagtagctgggattacaggcatgcgccaccacgcctggctaattttttgtatttagtagagacagagtttcaccatgttggtcaggctgatatcgaactcctgacctcgggtgatccgcccgccttggcctcccaaagtgctgggattacaggcattagccaccgtgtccagcccatattttatattttgtagaaatggagtctcactatgttgttcaggcttgtctcaatctcctggcctcaaatgatcctcctgccttggcctccagaagtgctgggatttcaggcatgagccactgtgcccgggcaggagtgctttcagaatgtgagtcagtgctgaccctgcaggtagatggaagatcagggccacatgaggaggtgccaggctaccagagcaacctcttgccaatgaaactgttacttctttacctggagacttgtgggggctccgtgctactcactggagaaaactccttgagaaggctctgtttgaggtcccccatgctctgcccctatggaccttcccagcattctgacctttcctctcaccccaagcatctgaggccccagccttgggggacagctctccattccctaaaacgtcatgatcttttcctgccttcatctgaatggctcttctccctcctgcctctcttctttgcttggcagactcctattcaatacctagttcaggccaggagcagtggctcacgcctgtaatcccagcactctgggaggtgaggcaggcggatcacctgaggtcaggagtttgagaccagcctgggcagtatagcaagaccccatctctaaaaaaatagaaaaattagacaggtgtggtggcttgcacctggaatcccaacactttggggtgcccaggcgggcggatcacctgaggtccggagttcgagaccagcctggccaacatggtgaaacctgtctctacaaaaaatagaaaaattagacaggtgtggtggctcacacctggagtcccagcactttgagaggccgaggcatgcagatcactctgaggtcaggagttcaagaccagctcagccaacatggcaaaaccccatctctactaaaaatacaaaaattagctgggcatggtggcaggcacctataatcccagctactctggaggtggaggcaggagaattgcttgaacctgcggggaggaggttgcagtgagccgagatcgtgccactgcactccagactgggcgaaacagcaaaactccatatcaaaataaagaaatcatgtctgctatggcagacccacagtcagctgcagctctgagccaactgcaggatgaagaaccattgcctaattggaaagtgtcagcatcccagaattcaaaaaagaaatctgatgaggcttttcctgcttgatatattatatggagaatttagatcttatgttggtttgcacaagttccctgcagaaaaaaaaattgctctgtgtatatctcttggaaaataagataatactatttttcctttgcaaaggcagctataacagatgtgaagactcagtgctcggtggtgcccaggctggagtgcagtggcgtggtctcggctcgctacaaccccgtctgggaagtgaggagcgtctctgcctggccacccatcgtctgggatgtggggagcccctctgcctggctgcccagtctgggaggtgaggagcgtctccgaccggccgccatcccatctaggaggtgaggagcgcctctttccggccgccatcacatctaggaagtgaggagcgtctctgcccggccgcccatcgtctgagatgtggggagaacctctgccccgccgccccgtctgggatgtgaggagcacctctgcccggccacgaccccgtctgggaggtgaggagcatctctgccccgccgccccgtctgagaagtgaggagaccctctgcccggcaaccaccccgtctgagaagtgaggagaccctccacccggcagccgccccgtctgagaaatgaggagcctctccgcccagcagccaccccgtctgggaagtgaggagcgtctccgcccggcagccaccccgtccgggagggaggtggggggggtcagccccccgccaggccagcagccccatccgggagggaggtgggggggtcagccccacgccccgccagccgccccgtcagggagggaggtgggggggtcagccccccgccaggccagccgccccgtccgggagggaggtcggggcgtcagcctcccgcctggccagccgccccgtccgggaggtgaggggcgcctctgcctggtcacccctactgggaagtgaggagcccctctgcccggccagcggccccgtccgggagggaggtgggggggtcagccccccacccggccagccgccccgtccgggagggaggtgggggggggtcagccccccgcccggccagcggccccgtccgggagggaggtggggggggtcagccccccgcccggccagccgcccggtccgggagggaggtggggggggtcagccccccgcccggccagccgccccgtcccggagggaggtgggggggtcagccccccgcccggccagccgccccgtccgggagggaggtaggcgggtcagccccccgcccggccagccgccccgtcagggagggaggtggggggttcagccccccgccaggccagccgcccggtccgggagggaggtcggggcgtcagccccccgctcggccagccgccccgtccgggaggtgaggggcgcctctgcccggccgcccctactgggaagtggggagcccctctgccaggccagccgccccgtccgggagggaggtggcggggtcagccccccgcccggccagccgccccgtccgggagggaggtgggggggtcagccccccgcccggccagccgccccgtccgggaggtgacgggcgcctctgcccggccgcccctactgggaagtaaggagcccctctgccaggccagccgccccgtccgggagggaggtggcggggtcagccccccgcccggccagccgccccgtccgggagggaggtgggggggtcagccccccgcccggccagccgccccgtctgggaggtgaggggcgcctctgcctggccacccctactgggaagtgaggagcccctctgccaggccagccgccccatccgggagggaggtgggggggtcggccccccgccgggccagccgccccgtccgggagggaggtgggggggtcagccccccgcccggccagccgccccgtccgggaggtgacgggcgcctctgcccggccgcccctactgggaagtaaggagcccctctgccaggccagccgccccgtccgggagggaggtggcggggtcagccccccgcccggccagccgccccgtccgggagggaggttggggggtcagcccccgcccggccagcggccccgcccgggaggtgaggggcgcctctgcccggccaccaccccgtctgggaggtgtgcccaacagctcattgagaacgggccaggatgacaatggcggctttgtggaatagaaaggcgggaaaggtggggaaaagattgagaaatcggatggttgccgtgtctgtgtagaaagaagtagacatgggagacttttcattttgttctgtactaagaaaacttctgccttgggatcctgttgatctgtgaccttacccccaaccctgtgctctctgaaacatgtgctgtgtccactcagggttaaacggattaagggcggtgcaagatgtgctttgttaaacagatgcttgaaggcagcatgctcgttaagagtcatcaccaatccctaatctcaagtaatcagggacacaaacactgcggaaggccgcagggtcctctgcctaggaaaaccagagacctttgttcacttgtttatctgctgaccttccctccactattgtcctatgaccctgccaaatccccctctgtgagaaacacccaagaattatcaataaaaaataaataaattaaaaaaaaaaaaaaaacagatgtgaaaataaatacactcaactctaatatgattatacagaagagcatgaatgcatttcaaatgttagatgttgctagtattatcaaatgatttatttttcttttcttttcttcttttcttttcttttttttttttttttgaaacagggtctctctgtcaccgaggctggggtgcagtgacacaatcatggcctaatgcaacctcgacctgctgagcttaagcaatcctcccacctcacccgcccccagagtggctgggactgcaggcacgtgccactgtgcccagttatttattttttccttttaaattttttgtagagacaaggtcctactacgttacccaggctggtctcaaactcctggactcaagcaatcctcccacctcggccttccgaagtgctaggattatgggcctgagtcaccacactcagcctcaaataatttcatattgaccttttaatcattattcctctctgccaagcactgaaaagttgaatcattatactctatttctgcagtgatatagattatgaaaattcctttcgaattcattgcagcagctaacttttttgagtcattgacttcattttatattttaaaaattatgaaataccgtctgtcattgcattctaattaaaatttgtgcagaatgctttgggaaaatggatcttttatagaaaaaaaactggaacaaatgatttcttttctttcttttttttgttttttgagatggggtcttgctctgttgcccaggctggagtgcagtggcatgatctcggctcactgcaacctccgcctcccgtgttcaagcaattctctgcttcagcctccacagtagctaggactacaggtgcccactaccatacccggctaatttttgtatttttagtagagatggggtttcaccatattagccaagctggtcttgaactcctgaccttttgatccacccaccttggcctcccaaagtgctgagattacaggcgtgagccaccacgctcggcctgggacaaatgatttctatggctttcaaagataaaatatataatatactaaatcaggggtgtccaatcttttggcttccccggaccacattggaagaagaattgtcttgggccacacataaaatatactaacgatagctaatgggctaaaaaaaaaaaatcacaaaaaaatctcataatgttttaagtttaccaatttgtgttggtctgcattcaaagccatcctggatcatcctggggttgcacaagcttgcactaaaccaactctaacatagcttattctgttttactgttaaattatatctctgggctgggcaaggtggcgcatgcctgtaatcccagcactttggaaggccaaggtgggcagatcacttgaggccaggagtttgagaccagcctggacaacatggcgaaaccccatctctactaaaaatagaaaaattggctgggcacggtggctcatgcctgtaatcccagcactctgggaggccgaggcaggcagatcatgaagtcaggagttcaagaccagcctggtcaacatggtgaaaccccatctctactaaaaatacaaaaaattagccaggtgtgggccggttgcggtggctcacacctgtaatcccagcactttgggaggccgaggcaggaggatcacaaggtcaggagatcgagaccaacctggctaacacggtgaaaccccgtgtctactaaaaatacaaaaaattagctgggtgcggtggtgggtgcctgtagtcccagctactcgggaggctgaggcaggagaatggcgtgaacctgaaagacggagcttgcagtgatcacaccactgcactccagcctgggcgacagagcgagactctgtctcaaaaaaaaaaaaaaaaaaaattagctgggtgtggtggcacacacctgtaatcccagctactccggaggctgaggcaggagaattgtttgaacccagaaggcggaggctgcagttagctgagatcatgccactgcactccagactgggcgatagagcaagactctgttttgaaaaaaaataaattagccaggagggttggtgcactcctatagtccctgctacgtgggaggctgaggcatgagaattgcttgaacccaggaagtggaggctgtagcaaactgagattgtgccactgcactccagcctgggcaacagagcgacaacccgtctgcgaaaaaaaaaaaaaaaaaaaagcttttatggatgattaaattttagtacatttccaaaaaaaaaattcttgctaaatttaggtgtaattaattatgtattacgtaatggtactgtggttaggtaaagtaatccttatctgacatacaataatatgacgaatctcaaaacattatgaaaagtgaaaaaaagcagacccgtattgtatatttcatttgtgtggaacattctagaacaggcaaaattaatctataatgacagcaaaaagatcaatcgctgtctggggctgaggttggggattgattggggaaggaacttattttttttatttttattttttttgagatggagtctcgctctgtcgcccaggctggaatgcagtggcgcgatcttggctcactgcaacgtccgcctcctgggttcaagcgattctcctgcctcagcctcctgagtagctgggaccacaggtacttgccaccacgcccggctaattttttgtatttttagtagagatggggtttcaccgtgttggccagaatagtctcaatctcctgactggcagccactgcgcctggcgagtggaaggaaattttaagggtgatgggagtatttcatattttgattatggtagtaattacatgggtatgtatatttgtcaaaactaactgaatcatgcacttaaaatgaatgtgctttattgtatgaaaattaaagtgggctgcgcgcagaggctcacgcctgtaatcctagcactttgggagcctgaggcgggtggatcacgaggtcaggagtttgagaccagtgtggccacatagtgaaaccctgtctcaactaaaaatacaaaaaattagccggctgtggtggtgtgcacctgtaatcctagctacgtgggaggctgaggtaggagaatcacgtgaacccgggaggcggaggtttcagtaagctgagatcgcactactgcactccagcctgggtgacagcgtgagactccgtctcaaaaaaaaaaaaaaaaaaaaaaaaaaagataaaaaaagaaaattaaagtgtgttttgttgtatgtaaataaagtttgttttaaaaagaaggaaaataacgttacaactagaataaaaataatccgccaggcatggtggtgcacacctgtaatcctagcactttgggaggccaaggtgggaggatcgcttgagcccaggaattcaagaccagtcttggcaaaatggtgaaaccctgtctctacagaaaatgcaaaaattagccagttgtggtgatgagcacctgtcccagctacttgggaggctgaggcaggagacttgcttgaacccaggaggaagaggttgcagtgagctgagatctcgtcactgcactggaattacaggcacacgccaccacgtccagctaatttttgtatttttgtagagacgggtttttgtgatgttggccaggctggtctcaaacttctgacctcaggtgatctgcccaccttgaccctgaaaagtgctgggattacaggtttgagccactgcatctggccagatctaagagatttttttttaagtctctgtgtgttagaggtaaatactgaagttttttttttttgtttttttgagatggagtctcactgtgtcgccagtctggagtgcagtggcatgatcttagctcactgcaacctccacctcctgtgttcaggcgattctcctgcctcagcctcccgagtagctgagactacaggtgtgcaccaccacgcccagctaatttttctgtttttagtagagatggggtttcaccatgttggccaggatggtctcaatctcttgacctagtgatctgcccacctcagcctcccaaagtgctgggattacaggtgtgagccactgtgcctggctaatactgaagtatttaagttgaaatgctatgatgtctgagatttgttttaatacattctgtttttttttgttttgttttgttttgagacggagtctcaatctgtcgcccaggctggagtgcagtggcgcaatctcagctcactgcaagctctgcctcccgagttcacgccattctcctgcctcagcctcccgagaagctgggactacaggcgcccaccacctcgcctggctaattttttgtatttttagtagaaacagggtttcaccatgttagccaggacggtctcgatctcctgaccttgtgatccgcccgcctcagcctcccaaagtgctgggattacaggcgtgagccactgcgcccggctgttttaatacactctaagaaaataatgtgaaaaaagaaatgaatcaatgtttgctaatattgccatatttgaatcaaatattgccaatatatgttgaccattgtcaaagctggatgatgggtacaaaagagtttattatacaattattcccgttttctgtatttgaaaatgtctacaggccgggcatggtggcacatgcctgtaatcccagcactttgggagcctgaggcaggaggatcacttgaggtcaggagttggagaccagcctggccaacatggtgaaaccccatcactactacagatacaaaattagctgggtgtggtggtgcatgcctgtaattccagctactcaggaggctgaggcaggagaatcatttgaacccaggaggtgaaggttgcagtaagctgagattgcagcattgcactccagactgggcaacagaatgagactctgtctcaaaaaaaattggctgcatgaggtggctcatgccagtagtcccggcactttaggagcccaaggtagaggattgcttgagcctaggaggtcgagtccacagtgagctctaatcgagccactgcactccagcctgggtgatagagtgagaccctgattcaaaaaataaaaataaagttaacaaattcttgaaaacagataaaataggctgggcgcagtggctcacgcctgtaatcctagcattttgggaggccagggcaggcagatcacctgaggtcaggagtttgagaccagcctggccaacatggtgaagccccatctccactaaaaatagaaacaaattagctgggcatggtggtgaacatctgtaatcccagctactcaggaggctgaggcaggagagtcgcctcaacctgggaggcagaggttggagtgaaccaagattgtgccattgcactcctgcctgaacaacagagtgaaactccatctcaaaaataataataataataataataagagataaatccttattaccatcaaaagttaaaaaagaagaaagaagggccgggagcagtggctcacgcctgtaatcccagcattttgggaggccgaggcggacggatcatgaggtcaggagatcaagaccatcctggctaacagggtgaaaccccgtctctactaaaaatacaaaaaaattagccgggtatggtggcgagcacctgtagtcccagctacttgggaggctgaggcaggagaatggcgtgaacccaggaggtggagcttgcagtgagctgagatggcaccactgcactccagcctgggcaacagagcgagactctgtctcaaaaaaaaaaaagaagaagaagaagaaggaaacctagttcaaattttgataaggaaaaaaaaaaagagagaatttgttgcttcacataatggaaaggatctagcttcaagtgcggctggacccagggcgggctccgggagtctgtcttgttctctccctttcttgaccctactgtcctctaggttggttctgttctcaggcagttttgcttcagatgaaggtgggatgactaccagcatttcttagacttctatcctataatgtgagtcatccaacagaaagttccaataaaaggcctgcaattagcactttgggaggccgaggtgggcggatcacctgaggtcaggagtcccaaaccagcctgaccaacatggtgaaaccccgtctctactaaaaaaatatggaagtagccaggcttggtggtgcatgcctgtaatcccagctcctcaggaggctgaggcaaggagaatcgcttgaacctggaaggtggaagttgcagtgagccgtgattgcgccattgcactccagcctgagcaacaagagcaaaactctgtctcaaaaaaaaaaaaaaaaaaaaaggcctggaattagttcgcagggcactgttggcctggcctgggtctccagcgctcatcactcctctcttaatcagctgttctctaatggcaggagtgtgctaattagcctctgaatccccagcacaaagcaccctgcctgggacacaagtaggtgggtggatggatggacagatgggtgaggaagaggatagaaaataagcaacacagtgagaccatgtctctaaaaaaattaaaagagggctgggtgaggtggctcaggcctataatcccagcactttgggaaaagctgaagcgggagaattgcttgcattcaggagttcaagaccaacctgggcaataatgcaaaacccccatctccacaaaaaatttaaaaattagctgggtattatggcacttgcctgtagtcccagtgactcgagaggctgaggtgggaggatcgctcacttgagcctgggaggtggaggctgcagtgagctgtgattgtgccactgcacgccagcctgggcgacagagtgagacgctgtctcaaaaataaattaattaaattaaataaaaaataagaaaaagagctgggcacggtggctcacgcctgtaatttcagcactttggtaggccaagatgagcagatcgcctgaggtcaggagtttgagaccagcctggacaacatggtgaaatcccatgtctactaaaaattcaaaaaatttggccgggcgtggtggctcacgcctgtaatcccagcactttgggaggccgaggcgggtggatcatgaggtcaggagatcgagaccatcttggctaacacagtgaaaccccgtctctactaaaaatacaaaaaattagccgggagcggtggcaggctcctgtagtcccagctacttgagaggctgaggcaggagaatggcgtgaacccaggaggcggagcttgcagtgagccgagatcgcgccactgcactccagcctgggcgacagagccagacgctgtctcaaaaaaaaaaaaaaaaaaaaaaaaaaaaaaattcaaaaaattagccgggcgtggtggcgggcacctgtaatccctgctacttgggagcctgaggcaggagaatcgcttgaacctgggaggtggaggttgcagtgagccaaggtcgggttactgcactccagcctgggcgacagtgtaagactctgtctcaaaaaaaataaaaaataaaaaataagaaaaataagaaaagggtccctttcacatgtttacaaagcatgctaccatgctaagggcagaaactccaagtggaagtgacttcccaaagacagcatgttacgtgtgtcattctagggccacactttctccatggagaaggcggagggggtagggaaagttgccagcacactccagcctggttcctggcactgtgcccagcatttatagctagtttccattagtcctcatcctctataaagtgagggccactgtgcacctgtcctagatgaggaaaacgcacctggccagggacagtaaggagatgctgaaaccaaggttatcaggggtgcctgaccccaccatgctccacagcctcctttgggcaagacagactagggaagctctgtgaaccttgctaaagacattggactttggccgggcatggtggttcacgcttgtaatcccagcactttgggaggcccaggtgggtagatcacctgaggtcagaagttcaagaccagcctggccaacatggtgaaaccccctctctactaaaaatacaaaaatttgccaggcaaggtggcatgcaccgtaatcccagctactcgggaggctgagtcaggagaatcgcttgaacctaggaggcgcaggtcacagtgagcagagattgtaccactgtactcaagcctgggtgacagtgagactctgtctcaaaaaaaaaaaaaataaataaataataaaaataaaaagaggagtaatgatttgattccaacacttcagtctacctctactgtaggtatctggctccttggaagggcctctggtcctgtctccctccagggtaggtgtaatcagaactttttcagctgcaagtgccaggaatccaactcatacttcttggcttacgtgaaaaagaagtgcattgccttatacaacaggaaagttaagggtttcaggcacagcttgatccagacactcaaatgatctcaagaatatgtctcttcatatctggcctcttcaggcctctgtgtagacccatcctagccagctttttgctgttttttttgtttttgttttttgtttttttttttttgagacagagtcttgctctgtcgtccaggctggcgtgatctcgggttaccaaaactcccacctcctcagttcaaactattctcctgcctcagcttcccaagcaactgagactacaggtgcacaccaccatgcctggctactttttatatttttagtggagacaggttttgccatgttggccaggctggtctcaaactcctggcctcaggtgatctgcctgcctcggcctcccaaagtgctgggattacaggcgtgagccactgcaccttgctctgaccagcttttcctgcataccaacaagatatcaccagcagtgctgggcttacatcctatcagcttcctaactcccagtggagagagggcatctttttcacagcagctccaaggtgagtcttgggcacaagatgaatcaagtgcccatccctgagccaatgaaaacaggttgctttggttgggaagcacaggccatgtgaatacgccaggtcccctcctgaacctcatggagtgcctgtgaggagaggttggttccccaaaagaaaatccaataaagaggcgacgggaccaggcacggtggctcatgcctgtaattgcaccactttgggaggctgaggcaggaggattgcttgagcccaggaggtcgagacccacctaggccacatagtgagatcccgtctctaccaacaatttaaaaaattagctaggtgtgttgggcatgtgcctctggtcccaggtactcgggaggctctgaggatggatgggaggatcgcttgagcgtgggaggttgaggctgcagtgagctgtgatcgtgccattgcaccccagccagagggagaccctgtctcaaaaaaaaaaaaaaaaaaaaaaagagagaggcaatggtaagagctaaaccagcaggaacaagagaggcaaaggtcccccttttttttcttttaattgaaactgggtctccctctgtcacccaggctggagtgcagtggtgcaatcatagctcactgttagcctggaactcctgggctcaagcgaacctcccacttcagcctcctaagcagctgagaacacaggcacatgccaccacagctggctaatttcattttttttttttttaagagatggggtcttgctatgctgcccacactggtctcaaactcctaggctcaagtgattctcgccgctcctgggcaaatgccctctgacatcccttataaggacaccctttgaaaaggttgtccccctctcaaacatggagagccttgccagggccttccccactcactgctgtaactaattcttatgctgcatggacatctgcttcccagaacctccacccaccagccttgcccctgacctttgtggcagccccaaggctgcccaccccttcccctgctgcagcccacttggcctctgaaagcagcactgtctgcctgcaccttgccctctccagggccgtcaggctcgccaccttcaggagcctagttttcaggtccttcaccaatgccctcgtcctgtgggtggacatgaggccctccagagctgaaggcagtgtgtgcttcagtttctgcatctgtaaaatggagatagtatttgctacccaggggtgctatgaggattacatgaacatagtatagtgtctagaacagtgcccagcacatagtaggcactcaataaaagccagttattattcctgtcacttctgtgggagacggcacatcagagtacccaccttatctcggtctagtcccgtccagtcgcaggcctttgagtacagtacagccctaaggtttttacaattgaataatctataaaagatttacagatttattgtctcatttgagcctagtaacttttttgttgttgttgagatggagtcttactctgttgcccaggctggagtgcaatggcacagtcttggctcactgcaacctctgcctcctgggttcaggcgattcttctgcctcagcctcccgagtagctgggactacaggcgcacaccaccatgcccagctaatttttttttttttgagacggagtttcactcttgttgcccaggctggagtgcaatagtgccatctcagctcactgcaacctccgcctcccaggttcaagcaattctcctgcctcagcctccagagtagttgggattacaagcatgcaccaccatgcccgggtaatttttttttttttttttttttgagatggagtctcgctctgtcacccaggctggagtgtagtgccacgatctcggctcactgcaacctccgcctcctgggttcacaccattctcctgcctcagcctcccaagtagctgggactacaggcgcctgccaccatgcctggctaattttttgtatttttagtagagagggggtttcaccatgttagccaggatggtctccatctcctgacctcgtgatctgcccgccttggcctcccaaagtgctgggattacaggcgtgaggcactgcgcccggccagagcctcataactttgtgaggtgggcagttcaaatcttattaattccccatttaccaatgacaaaatgaggttcagagagattagccctcttggccaagatcgcacagccagtcagtggcagaggtgggacttgaacccgtcccttgctgttccttgaacttctccacacgacagggctgtccctcagcctacaggtcacccctctagccttgcctgttggctcttcctaatcctttcaggcccagcccagatactttttaaacaagaatgatgagagctaactttttttaaaatgagacggtcttgctctttcacccagagaagactgggtgataacagtggctcaatcttggctcactgcagcctctgcctccagggttcaagctattctcatgccttagcctcctcagtagctgggattacaggggtgcatcactacaccacgctaatttttgtatttttagtagagatgcggttttaccatgttggccaggctggtctcgaactcctgacctcaggtgatccgccagccttggcctcccaaagtgctgggattacaggcgtgagtcactacgcatggctgagagctaacgtttattaagcacccgccactttctagatgaggtccttactgacttccttgggttattttaggtaatcatccccatacctcttacgtggcaggtatgactgttacagagggagaaaccgaggctgagaaaggctaagtagcggccacacctcactcagcaggtgacaggctgcggtcgcactcatgacatagtctgactctagagcaggcctttcctgcccgctgttgctgcctccagaagcctctctgaatccaagggtgggaactattcctccttgccctcgagccttcgccaaagccagggcttggagcggccgtgggctcctcctccttcccccaggctgggctcttcaggggcggaaacctgcctggcttgcctgccttgctcgaccctgtagcccctggcacgaagtaggtgcccgtgatgccggattatttcagcaggagggcaggggtgttcccgatgaagccaggagatccagggaggagaagcgactcccggggccacccatgcttagatctcagagccaggcaagagccaggtcccgggggtccaggagcgcgctcggggctcctcctcgcccgcgccccccgcgcccctcgcgccccccgcgccccccgcgccccctgcgctcgcgtctgcggggccgggaggaaggggcggcgcagccgggccggggcgggcaccgaggcctggcgggcgggcctggggcgctttcgtgcctgccagggaaaggctggcgaggaggctgggggcggacgcagggaggaaagaagcaatggggtgctcttgcgttttgacattttaaaaagaagtttagattcgcttcccggagccgggatggcagcctgcgctatggttggggaccaacgtggtgcacgggcaggggccggggagagaggcggccgcagcgggagcccgggagcgcagggcgggcctggaagagctccgccccaaggggcgcggccaccccggaggcgggcgcacggctgcttctcattcattgtcttgacaagagcatcttcagcgggcgagtccccggctcctccagctccttcctcctcttcctcctcctcctccacctccggcttttgggggatcactgtcctctctcggcagcaggtgaggctgggcctgggaggcgcgggtgggccggggcgagggccacctgtggggcggcgcgcgcgtgggagccgcgggctgcgggggcgcgcggctgtcaccgcgacccagccagcgccggggccaggtagcgggcgcagcagcccgtggggggacgctgcttggagtgggggccgccggggccccagagcgctctgcggaggcgagggctagggaccaccgcggccaagatggaggtgggtggccgggggtcagcacagtgtcgagggcccgactccccacggaattgagtctcggggagggtggggacgagggcagggtggggtgagcggggcagctgccctgggcttggagacaggaaggggttgagagcaaaacaagaaaagaccaagttcccctttccgtggtttccgggcctggtacctgtggtgggggaggaggcagggtggggcgatggcttcctgtcccccacctctggtccggggctcccctctctccagatacaggctgctcctcaagactggggctcttcacatacgctcctcaccgctctttgggcaggccgacctagcagcctcttcgggagtcctggggtggccgggggtgctggagcccccagtgagtaggcgaggctgaggctaggggcagaggctctgggcatggcaccctccaagcggcagcacaggccccttccctgagcaggaaggtgatgcggtggcacaaggtcgcccctggagttccttgctccccacccagacactgggggaaaccatcctacctggacctcagagcagtcggagtggcctctcccttcctgtgtgcagtttacatgggggtggagatggctcttaagggcacctgcttttctgagcggaggcgagaggcagaggtatggggaggaggagatacctggacctgagccagagacctgctggggaagctatcctgccgcctcactcccctcaggcagcccccacgccacttcctcctgtgtccagccccatgccagcaggcgagggaggccagctcctgtccctgcctttaggaagcgctgtgtgggtgtgagggaggtgggctctggacacggtaactaagagagaacccaccctcggagccatctgggctgatgacgcctgagtctgaaccattaggaaggacgggctctgcatccatcagccagtcagtcaacaaacatgcagtggggcaacaccacgccaggctctgttgcagaggctgagggtacagattgagagggtggctcagagtggcctggggccagggagaagggggcttgcaggttagagggaaggagaggctggggaaggcaagcaggcatcagccacagagggaagaatagggagcccctggagatgatgctgggaccttaaaagccagactgaggggtgtcctgggggaggtggggaccactggaagatcagagttgacctgaagggagaaatgctcttatgctgtgtgcccccagaatgagccggcaggtggtccgctccagcaagttccgccacgtgtttggacagccggccaaggccgaccagtgctatgaagatgtgcgcgtctcacagaccacctgggacagtggcttctgtgctgtcaaccctaagtttgtggccctgatctgtgaggccagcgggggaggggccttcctggtgctgcccctgggcaaggtgagcccctggggccctggggggagcagctcctccaccggacccatggctctgtgcaggtcctgattaggtgacggtcaccaggccttccagggcctgtgttgccatctggaaaactgagctgggccccatgagccttacacttcctccagctcctctgtgctgtggctgtgtggaaactgacgctcagaaggagccaacacaagatgggtcacaccagtgaccaggactacagacagtcctgcagacccatgatcagccctcctgagcctcagcctggggctttctccccatggaaacacagagggggttgggatggggtctgggggccctggcagcgttctcagggttgggagggactctggctctgggcctgtctgaggacctagcaactctgtcccccagctcgcaggcagggatgatgcaagaggtgctctcccccacccgcagccctgccctcccctggagcctgctgccccctccgctggctggctgctgccccgcacccccagcacactcctgtgctctttggggggtaagacaggaaggggagatgggccccaagttgttaccttaaaagggctgatggaagcaaagagaagaggaagtggttgtcggggtgagagctgggcccgcgccccacatggctgtcacacaggaagccctgctgaagcagctgtccccggaagaagccatttccaaacctctgctcctgcctggggccagttgggacaggctccctggcccctctccttttgggaggacccacccctgcagccccaccactcacactcgctctctggggagctgcctccacccccccagcccccatacacctgtcctggctccagggccagttgtgcccatggaagcctcactcggggaagctggggtgggggtgccaaccctaagggcagagacagactgagacagagaccggcgggaactctgccagggtcttgcacggcccccaacctctgccatgcgtggccagccctcctggggtttgcccaggccattttgggactggaacaagagaagaacaacccgcccccgtccccaccccaggccctggtccagctcccagggacaccacagctttcctctctgggcctctctgaaggaggtgtggggaggttggattgggtttgggaggcaaaagcacctccaaggccctgctgtgcctttagactggacgtgtggacaagaatgcgcccacggtctgtggccacacagcccctgtgctagacatcgcctggtgcccgcacaatgacaacgtcattgccagtggctccgaggactgcacagtcatggtgagtggtggtggggacccaggggctgggagaggggctctaggatgggatctgacatttggagtcctgaagactcactggcccctcctctgcaggtgtgggagatcccagatgggggcctgatgctgcccctgcgggagcccgtcgtcaccctggagggccacaccaagcgtgtgggcattgtggcctggcacaccacagcccagaacgtgctgctcagtgcaggtgctgcgggaggaggggcttgggggtggctcgtggcctgcagtggatgagggcaggaggctcatggcttctgacactgtggggaacgtgcaggttgtgacaacgtgatcatggtgtgggacgtgggcactggggcggccatgctgacactgggcccagaggtgcacccagacacgatctacagtgtggactggagccgagatggaggcctcatttgtacctcctgccgtgacaagcgcgtgcgcatcatcgagccccgcaaaggcactgtcgtagctgtgagtcgccatctaccctgacctttgaccctacagcctttatccttcttatccaccatcagccaggcccttggatgctgccctccctcgcctccacctgggactggccccgtagggtatgtacgggtgcctgacctaccacctccctttccttgcaggagaaggaccgtccccacgaggggacccggcccgtgcgtgcagtgttcgtgtcggaggggaagatcctgaccacgggcttcagccgcatgagtgagcggcaggtggcgctgtgggacacagtgagtgctggggcaggaagccgagggcccccaggctgggaaccaagactggaggtttcgtccctgctctgccactcacctggcaggatggccatgggcctcagtttacccaggcgtgagatggttgttcccactggttggtcgggagggccctcacaggtcactgcccagggaagaccaccatcccagggcctgggatgttacctctcacctgtgtctacagaagcacctggaggagccgctgtccctgcaggagctggacaccagcagcggtgtcctgctgcccttctttgaccctgacaccaacatcgtctacctctgtggcaaggtggcctcgtcgggcggggtgggggtgggaggtgggcaggatgggcctggagagggccagggcagtgggcatccgctggtattgaccctccctccacacctgccacctacagggtgacagctcaatccggtactttgagatcacttccgaggcccctttcctgcactatctctccatgttcagttccaaggagtcccagcggggcatgggctacatgcccaaacgtggcctggaggtgaacaagtgtgagatcgccaggtgactgacccccggccctgaccgcagcatgctccttgggcagtgggcagtcccaagcccacccaaccagactgtgggccccgctcaccttccccttcccacaggttctacaagctgcacgagcggaggtgtgagcccattgccatgacagtgcctcgaaaggtgatgctcccccgccccaccctgggctccaggctgggcactgactttgcggtcttgtggggggtgtcctggcataagcgctttcctcactatccctggccttgcccacagtcggacctgttccaggaggacctgtacccacccaccgcagggcccgaccctgccctcacggctgaggagtggctggggggtcgggatgctgggcccctcctcatctccctcaaggatggctacgtacccccaaagagccgggagctgagggtcaaccggggcctggacaccgggcgcaggagggcagcaccagaggccagtggcactcccagctcggtgagagggctgggaagccagggaataaaactgggagggtggggtggggctggtgtttggggcacctcaaactcacaacattgggaatctttgtgggtccgggaatggtaatcctgaggcctcagaacacaggtttcagattgataggcctgcaggtctccaggcagcaaccagctgagcgactaaagggcccaaggccagggctctagggatggggctcagcagaggctggggtaaggggagccagggaggagctgggcctaatgcagcaccgggtccccaggatgccgtgtctcggctggaggaggagatgcggaagctccaggccacggtgcaggagctccagaagcgcttggacaggctggaggagacagtccaggccaagtagagccccgcagggcctccagcagggtcagccattcacacccatccactcacctcccattcccagccacatggcagagaaaaaaatcataataaaatggctttattttctggtacctcccagactctgatgactggtcccctagacacgcagtttgctgaaccaaccagccctagagcttcccctccaccgcgctgaggggactgacccatggcaggggatgtgggatgccccctgacttactacatcacaggaacagggccttcgtgggtagaaaccagccatgctgatgtgggccaggaggctgctctccgtttccgagctccttctcagagctgacacagctgaactatttaaggccctagcttagaacctcaataattcccaaatttaccaaaaatctgcctttcctagtcaaccaaaacatcacgttgcacgtgactctgctggcactgttgcttgtgaggaaatgaaccaaccatcacttacagggtaggcatcttttaaactgcaggtccaaagataaaaataacgagggaggctgggcatggggactcacgtctataatcccagcactgtgggaggctgaggcggcaggatcatttgagcccaggagtttgagacctgcctgagcaacacggcgagataccgtctctacgaaaaataaaataaaaaattagccaggcatggtggtgggcacctatagttccagctactcaggaggctgaggcaggaggatcccttgagcccaggaggtcgaggctgcaatgagccattgcaccactgcactgcagcctgggtgacagagcaagacactgtctctaaaaaatataaataggccgggtgtggcagctcacgcctgtaatcccagcactttaggaggccgaggtgggtgaatcacctgaggtcagaagttcgagaccagcctggccaacatggtgaaaccccatctctactaaaaatacaaaaattagctgggcatggtggcaggcgcctgtaatctcagctactcaggaggctgaggcaagagaattgcttgaatccgggaggcaaaggttgcagtgagccgagatcatgccattgtactccagcctgggggacaggagtgagacttcgtctcaaaaaaaaaaaaaaatatatatatatatatatatatatattttttaaatgtataaatacatcatatatattttaatatataaatatattatatatattatatattttaatatataaatatattatatataatatattttaatatataaatattatatatattatattttaatatataaatattatatatattaattatatattttaatatataatatatattatattatataataataaattatatattatattatatagtaataagttatatattatactatataataatatagtataatatataatatatattataatatatattatattatattatattatattatatattataatataaattatatatattttatatatatgttttatatattatatattttaatatatgaaacaggggaacttcttctaaggaaaagacagaattaaggcaacaggctgatcctagtttaccagagaagaaactgaggccgggagcaggagcccagctcactgaagggcagatcccaagtcagagtccaagtctccccacttttttatttatttaattttttctgagatggagtttcattcttgttgcccaaattgagtacaatggcacaatctcggctcaccgcaacctctgccttctgggttcaagccattctcgt

SEQ ID NO: 336 - DNA, 744959 bp, Homo sapiens
  source 1..744959: mol_type = genomic DNA
aaggtgggcttgactggaggaaggagggtgtgaagccgaggggtggtggctataacgtacagcaaccctgtgtcggtgccccctgcccgcttctctagtgtcctacgggtcctggtaccagcacgtgcaggagtggtgggagctgagccgcacccaccctgttctctacctcttctatgaagacatgaaggaggtgagaccgactgtgatgcttccccccatgtgacacctgggggcaggcacctcacagggacccaccaaggccacccagccccgtccctgggcggctcccacagcaagcccggattccccatcctacctccctggcccaggcccccccactgcagccccacctggcagcaggctcggcacagctttcatcttctgcacctgagtcagctgcatgggtggccacggatcagatacttagtcctattgcttatcctcaccaaagggtgtgccacccagggccacagtcatggaagaagaccatcccggtcctcacccataggcgccaagccctgttcatgatgggatcacagggcagagatcaattcattttactccagagactagggccccaggggttgaggctctttggggtttctaggggaagtggccagatcccctctgaggttagagagggggacccgttttgttttgctccactgaggagccctctgctgctcagaaccccaaaagggagattcaaaagatcctggagtttgtggggcgctccctgccagaggagaccatggacttcatggttcagcacacgtcgttcaaggagatgaagaagaaccctatgaccaactacaccaccgtcccccaggagctcatggaccacagcatctcccccttcatgaggaaaggtgggtgctggccagcacgggggtttggggcgggtgggagcagcagctgcagcctccccataggcacttggggcctcccctgggatgagactccagctttgctccctgccttcctcccccaggcatggctggggactggaagaccaccttcaccgtggcgcagaatgagcgcttcgatgcggactatgcggagaagatggcaggctgcagcctcagcttccgctctgagctgtgagaggggctcctggagtcactgcagagggagtgtgcgaatctaccctgaccaatgggctcaagaataaagtatgatttttgagtcaggcacagtggctcatgtctgcaatcccagcgatttgggaggttgagctggtaggatcacaataggccacgaatttgagaccagcctggtaaaatagtgagacctcatctctacaaagatgtaaaaaaattagccacatgtgctggcacttacctgtagtcccagctacttgggaagcagaggctggaggatcatttcagcccaggaggttgtggatacagtgagttatgacatgcccattcactacagcctggatgacaagcaagaccctccctccaaagaaaataaagctcaaaataaaatatgatttgtgttcatgtagagcctgtattggaaaggaagagaaactctgagctgaaagagtgaatgcccggtggggccacatatggtcacctctcccccagccttcagctccccaggtcaccatatctggggaggggagaagggtttggagaagtaaaacccaggagatgtgtggaggggggatgtctgtttaatcccagcacatcctctgctgtcctgccccaagatggtggaggacgtcgagtccgccgggcagcgtcactttttcttgggctccttagaagctaccaggtacctctgggccacactgagatgaggggagtagccgtctgcataggaggtgtcttcaaacaggatagaatagtcctcctggggctgtggggcaggtggacaggaagggcagagagcagccccggggctggtgtcactcacttgttggtggcatggctgtaactgaccacctcggccaggatccactgctcatccccatccacggccttcacccgggcagccaccttgtctccaggtctggccacgtagtctcctgaggcagggatggccccacagaggggtgggggcctgtgagtggaacaaaggatcagtcccagcccctgggcaccagccccttcctcgcagctgctgccctcacttgtcaccaggcttcccaatccacaggggcagggtcatggccgactgctgcagcagggtcatcagcacccctctgcgcatggtcttccggggtggctccaagtcattgtagagacccgcgatcttggccactgtgggaagaaagggaggcctgaggccccagggacaggggctggccctgaccccccagcatgctgaactgagctgctggaggagcacctgggagcccccagctcccgagtgagcccgagggcacagcaggactgtgacctgatctgccaggtgtcctacaggggctgctgcgctcaactacatatgggtgagacggcagcacaccaggcacccaggggaaggaaccagggagggacaaagcgggttctgaggtgctggtgaggttctcttcttgatgtcggtgctgacacagaagtgtgtttcgttagtgaaaagttcctaaaattcgaagggtcccgcgggaatcggggcgaggccgggtgcctcttcagcgtccagctgctctactgcctgaatccctggtacccgggccctgtctacgtggggctcactgtcaaccctgttcgtccagcagcacaatggtggccgcaaaaaaggcggggcttggcggaccattggccgaggtccctgttaagagggggagggtctctgtgcccggaggaaggctccctggaggaggcggaaccggggggcacaagcctgctgagagggacccactaggtctgtgacgtgcgcgggacgtcccgggcgaggcctgttggtggggggaggctgtcgcaggggaggagcctaacggggaggcggtgccctgggaatctcggcgttagaactccggagagcagctggctgaggcgagggtgatgatccaggctggggtccagcgcaggggtcttggggggcacgctggggtcgggtggagcgcaggagggagaggaatgagaacaggtgggtacctgggctggaggcgggacctgaggtgggcaggtgcagggggcgtgccttcaggcagttgcggggccagggctcggctgaagctgggagtgaggaccccgttctccggtgggataggaggggacccgcgatgctgggctgcgctggcggtagggcgcggcggggctcacaggaacattcctgttgtcctccccatggagattgtgctcgtcgtgcacggcttcccatccgccgcggccgcccttcgggtaaagaagaagaccgggcggcggcctgtggcctggatttggggtccgacccccgcccggagccgccttgactccaaccccgccgcggttggagggggcctggcacccccgccctgggcgctcctcccggtcccgttgcgccccgacctccgtcagccgcacggcactggccactgaccgtcgggcctcctccgccccagggcgccgcgcaggtccctttgctgacgccgagcctgagcctgagccggtcccggggtccaagagggctgtgtgcaccctgcgcgtccgcgcgctccaggggaggtgcgctccaggggaggtccgccccaagcagagcggcacatcctccagacgacttcggatcctgctgttgaggagccaggaaacgccctgacactgttgcggccctgtccacatctctaagatggggatggatgatagtacttctggccattcctgagcacagcaggacctgccttttccctttgactggaaggttcttctctacatcttcagtcttgataacctgccacctccacagggaggtcttccctggctcccaatttaaaattgcagctctgagaagccgggcatggtggcatatgcctgtagtcccagctacgggggaggctgaggtgggaggatcgcttgagcccaggagttggaggctgaagtgagctatgatcactccattgcactccagcctgggggaaacagcaagaccctgtctctaaaaaaataaaatacaataaaattgcggctctttcttgtgcacttccctgcccgcccccctttcctgaacccttattattttctgccatactacaaattttatgcatctcattaaaccccttccgaacctgtgtactaaactgcctgggggcagctctcatcactgctgtagaacaaagtcccacatagagccaatggccaagaaacagttaataaaataacagacgatggtcctggcctctactgtgagtgagtaaagggcttgccctgcagagattcagtgatctggcgggggttgctgagctatgaggaagttcagatctggctgcaggggtgaggctgtgactcagtcaatcactgcccatgctcacaggacactggccagcttagtccctgggggcaaggattttacccccccccccccacctccatttcctcatctctaagatgtgaataatcgtcgcccctgcctcacaggattgagctgtgtaacccccctcccaccttttttctatgccatccactgcgggtctggggctttttactggaatgcaatacaaagtctgagtcaagggtgccttctgttggttgctgagggcggaggcagagctagttgcctgtggtcctgccagtcaaggggcttccagaggagggaggaggggcctgtggccctagcatgtgagcagcttctcctctgcctggaagccggacgcctcagcttctcccacactcccacctgcccgcttgcctctgaattcacacaattcttggaaggcttgggagactcacctttactcaaatggttacctgtctcgtgtctcgtgcccagcttgaccttttttttttttttttttttttttttgagttggagtcttgctgcgtcacccaggctagagtgcagtggcgtgatctcagctcactgcaatctccgcctcccgggttcaagcaattctcctgcctcagcctccccagtagctgggattacaggtgcccaccaccgtgcctggctaattttcgtatttttagtagagacagggtttcaccatgttggccaagctggtcttgaactcctgacctcgtgatctgcccaccttggcctcccaaagtgctgggattacaggcgtgagccaccatgcctggccccagcttgaccttgaactttaaatagtgaagacaaagaatgaggagggtggggggatgccctccttccacagggccctgtggcttccaagcctcaacctcctctggtctcttgtctgtggagcctccttcaaacccagggaaacaaaagcacctgccacgggctgctgtttttctaggatcttctagcgaagctctgtaacttcccctgagagccatgaaactgggctggctcccagggtgatgggactccagcgtctttgttctttcttgttctatgcatccatgctctgctccaccgctgccccttcaactctgcccacacatattactccagactggccctgtggtcagagcctggaatgcctgggctgctgggggcttgcatgcaggctgcactggactagaagcattggcgccttcaagactgccctgggaaacatgacctgccctgtttctgtctagtgagtacccatttttccccactcaccggctcacttcccttggctgggtcaattagaaaaagctcttctgttggcctgccctgcagggtggagttcagagggcagctcaagagcccggtgacagctcaaaaaataaaaaaagccgccaggagcagtggctaatgcctgtaatcccagcactttgggaggccgaggcaggcggatcacctgaggtcaggtgttcaagaccagcctgaccaacatggtgaaaccccgcctctactaaaaatacaaaaattagccgggtgtggtggcggatgcctgtaatcccagctactcaagaggctgaggcaggagaattgcttgaacccaggaggtggaggttacagtgagccgagatcctgccactgtactccagcctgggcgacagatcacgactccatctcaaaataaataaataaataaattatacattgggctcttttgccttttattcttgtgctttctaatcacaactaaacactaaactcacatcttggctttgcagatcactctaagcttggctgcagctgtggtgctgaggaggctaatagagaagctccctcgctctcaaccccaccccttccttccgggagcaaacccaagtctggtcccgactccggatccctcccacattagacctaccacaccctcagggcagacaacagctccacacaccccacactcagccaccagggcaagggagcaaaattccagaaagctcaggtgagtaccagagtggaatggcccagggcgccctcaccctgctcagcttttggagccaacattccagcagccaaggcctctgccatactggctgtttccccacggatatccagtttcactaggggaactccagcctggcttcccttctttcttttttatttttgtttttttgagacaaggcttggctctgacacccaggctggagtgcagtggccaaattgtagctcactgcagcctcaaaatcatgggctcacatgataatcacgcctcagcttccctggtagctgggtgtacaggagagagccaccatgcccagctaattttttaaacttatttttaatttattttttatttttttgagacggagttttgctcgtgttgcccaggctggagtgcaatggcatgatacagctcactgcaacctccgcctcctgggttcaagcgactctcctgccttagtctcccaaggagctgggattagaggcatgcgctatcacaccctgctaattttgtatttttcatagagaaggggtttctccatgttggtcaggctggtcttgaactcccgacctcaggtgatccgccccaccttggcctcccaaaatgctgcgattacaggtgtgagccaccacacctggctgcccagctcagttttaaatattttttttctagagatggggtcttgctgtattgcccaggttggtctcaaagtccaaggctcaagtgattcttccccactgggcctccaaagctctgggattacaggcatgagccatggtgtcccctcctcattctgcggaatcatcagagttttgttcattcccacaccaggctctggcccccagtaccagctcagttgctcaatggaccatgcttgtcctggagcccagatggactgtggctgggcaggtggatcacaggcctggccggcctgggaggtttccacatgtgaggggcctgaggggctcaaggaggggagcatcggggagaggagcccactgggtggaggctgggggtcacagcagaaaatggtgagacaaagggtgctggctggcagggagacagcacaggcaggccctagagcttcctctgtgggcggcaagccacccaggcaccgaggcaagagacagaggacacgatctgttccagtataataaaatataaaacaagaatagttataccagatatagatcttagatatgattatatatgaatatcattaatcattagtttgtagcaattactttttcttccaatattataataatccttgctctataatcatagcctaggaaaaaccaggccatacagagacaggagctgaagggacatagtgaggtgtgactgcaagacaggagtgcgagccttctgttatgcccggacagggccaccagagggctccttggtctagcggtgacgccagcgtctgggaagacgcccgttaccaggcggatcgtggtccagcggtagcaaaaggtgtcaagaaacaacacccgctactcagcagaccaggaaaggggggtctccctttccctgggggagtttagagaagactctgctcctccacctcttgtggagggcctgacattagtcaggctcgcccgcagttatccggaggcctaaccgtctccctgtgatgctgtgcttcagtggtcacactcctagtccaccttcatgttccatcctgtacacctggctctgccttctagatagcagtggtaaattagtgaaaatactaatagtccctgatatgcagaaataatggcataagctgtctttctctttgtctcctctccctctctgcctcggctgccaggcagggaagggccccctgtccggtggacacatgacccacgtgaccttacctatcattggaggtgactcacattctttaccctgccccttctgccttgtatccaataaataacagcgcagcccgacattcggggccactaccagtctctgcacattggtggtagtggtcccccgggcccagttgccttttctcttgtctctttgtcttgtgtctttatttctacactctctcattgccgcacttagggagagacccaccgaccctgtggggctggtccctacagagaatgacttgaacctgggaggcagagattgtagtgaggtgagattgcaccactgcactccagcttgggtgacagagcaagactctgtctcaaaaaaaagatgaggtgagttcagtttgggaaatgttgaatgccagatgcctttggcctattcagagggagattgccgaagcacagaggagagttcatgacagggtttaattatttttagtgctctcatgtcccagattcggccaattggagtccctccacgctggttcctgtgtcctgtgacatcacccatcttctttctccttttcttctttcataagccacttccttcctggcatgacagtgtgttccaggaccatcttgtaccttgcacctgccctgccctggccctagaatcagccaattctctgaggcatcctgattcctttttgtgggggaacggtttgagaacaaaatatactactacatgatactatattctgacaggaaaaaacacagccataagaaataaagccatggccgggcacagtggctcctgtaatcctaacactttgggaggctgaggcaggaggattgcttggggccaggagttcaagaccaacctggcccacatagtgagccctcatctctattaagaaaaaaaaaaaagaaagaaggaaagccatatttggatgagtttagtcttctgattatttttgctgaagttttaaattattattattattattttttgagacagagtctcgttctgttgcccgggttggggtgcaatggtgcagtctcagctcactgcaacctctgcctcccaggttcaagcaattctcctgcctcagcctcttgagtagctgggattacagattcctgccatcacgccctgctaatttttgtatttttgttagagatggggtttctcaatgttggtcaggctggtctcaaactcccgacttcaggtgatccggctgccttggcctcccaaagtgctgggattacaggggtatattttatatttaaagtatatttaaaaattaagggccaggctcagtgtctcacgcctgtaatcccagcactttgggaggccgaggtggctggatcccatgaactcgggaatttgaaaggcacaagagcgaaactccgtctcaaaaatatatgtaaaatatattttatggccaggcatggtggctcacaaccgtaatcccagcaccttgggaggccgaggtgggcagatcacctgaggtcaggagttcaagaccagcctggccaatatcgtgaaacgctgtctctactaaaaatacaaaaaattaactgggcgtggtcgtgtgcacctgtaatcccagctgctcagaggctgaggcaggacaatcccttgaacccgggaagtggaggttgcagtgagccgagatcgcaccattgcactccagcctgggcaacaagagcgaaactccacctcaaaaacaaaacaaaataaaacaaaacaaaacaaaacaaaatatatgtatatacacacacacattatatgtaatatctacttttaaatataaacataaatattataaagcttttattgcaattgttcattttagaaacttcagaaaatacaaattagtaaaaagaagaaaataagtctgtaataccacttttaagaactattttaaaaacctctagcttttttttgagatataatttacataccaagacttttttaaaaaaaaaaattcataatggtgacttttttatcggactgtatagaataaagcttgttaaaatgtctaagatattttgtaatatatgaaaatttcagctaaacttgtgctatagcatcccatggtttgaatatattattgaaaatcattccataaacaatggtttggtatatagttttaacaattcaaggctgggcacaatggctcacgcctgtaatcccaccactttgggaggaggaggcaggcaaatcacctgaggtcaggacttcaagaccagcctggccaacatggtgaaaccctgtctctaataaaaatacaaaaattagccgagcatggtggcaggtgcctgtgatcccagctactgaggaggctgaggcaggagaatcacttgaacctaggaggcagaggttgcagtgagccgagatcttgccactgcactccagcttaggcgacagaatgagactccatctcaaacaaaataaataaataaaataattcagcaggatgaggtggctcatgcctataaccccagcactttgggaggctgcggtgggactattgcttttgcctgggagttcaagaccagcctgggcaacatagagataccatgtctcagaaaatatatatataattaattttaaaaaagagaattcattgatgattctgtatttacaaatatattcctgcatcatttgttcatggtaaccaggaaattgcaatgcataaatacatgctgtcatttccaaagcggctctcttccagaattggtactgattctagtagacttttcattctgatgttaaaaatataattaatagaaatgtcttgtacctaatagcttttttccccacaactccccaaccccctcactctagaggccttagtagtctaatttaatcagcttagtctgaaatataatactaccttggcatcttgttggcctagtatttcttactcttttatggaatgaactgtgcaattgttttgtgtggctaaaaggtattctaggtcgagtatagtggctcacacctgtaatcccagcgctttgggatgccgaggtgggcggatcacctgaggtcgggagttcgagaccagcctggccaacatgttgaaaacccgtctctactaaaaatacaaaatttagccaggtgaggtggtgtgcatctgtcatcgcagatactcaggaggcagaggcacgacaattgcttgaacccaggaggcagaggttacggtgagctaagattgcatcactgcactccagtctgggcaacagagtgagaccctgtctcaaaaaataaaaaacaaaataaataaataaaaaataaaaggcattctaattaagttgttgcttttttttttttttttaattccagagcggactgatgtactggcccttagtacaggtgagttccgcctgctcagtaatatgaactcagggctttggtttccatgtggccctaatggactcactctccctgttccagctaaccaacttcagccttgttcctgttcaatggagaacagcttacgctggagtctgtggttttctctgggccaccttcatctgtttttcccagcagagcggtgacggcacattcaagtcagctttcaccattttatatacaaaggggaccagtgccacagaagggtccccggagaaatgagaagtcaaggactctcttaaagggaccacattttgacctaaaatgcacagaattgcctgcagacaaaatatttgatgtgccaattatgcacttcattttgaggaattactactatttatagacccacttttaaaaaaattatcaatgattattttttaattgtattcagacattttttcctgatctagtctgaaatattacttctctaatattttggttaatatgaataacagtggcaaaatggcattttagaattattaatatttctaatattttaatgcaagtttcaggaaacttggtttcttggttttgattgtttacatttctattctaaaatctcaggttatctcctgaacacttttggacagatgaagttttacaccaaaaaatagttcttagagtgaattttaatttacatagaactcaatcgaaatgaagatttaataaccagatttctttccccaaaacatacataatttgttattttgatactaaaatttagtaaatacctttttttttttttttttgagatggagtctggctctgtcacccaggctggagtgcagtggtgccatcttggctctctgcaacctctgcctcctgggttcaagcgattctcctgcctcagcctcccaagtagctaggactacagtcgcccagcaccacgcccagctaactggtggtggtagagacagggttttaccatgttggccaggctggtctccagctcctgacctcgtgatccgccctcctcagcctccgaaagtgctgggattacagcagtcagccactgcgtcctgcccccaaatttgctttgcatggagaaaactctaacaagtcctcttgaacacagttttctgataacccagatcaatgaactacccaggcttcaccactatgcgatataggcatgtgagaaactcgtacttataccccctcaatacattaaaactaaatatatatatatatatatttttaaatcaatgggccaggtgcagtggctcacgcctgtaatctcagcactttgggaggccaaggcgggtggatcacttgcggtcaggagttccagatcagcctggccagcccgcctctactaaaaatacaaaaattagccaggcgtggtggtgcatgtctcccaccacggctgggaggtgtgcccaacagctcattgagaacgggccatgatgacagtggcggttttgtggaatagaaaggggggaaaggtggggaaaagattgagaaatcggatggttgccgtgtctgtgtagaaggaagtagacatgggagacttttcattttgttctgtagtaagaaaaattcttctgccttgggatcctgttgatctgtgaccttaccctccctccactattgtcctatgaccctgccaaatccacctctgcgagaaacacccaagaatgatcaataaaaaaaaaaaagagttctggagatcagtaaaaaaaaaaaagaaacagggtttctccatgttggtcaggctggtctggaactcctgacttcaggtgatctgcccactttggcctcccaaagtgctgggattacaggcatgagccactgtgcctggccccaaatgtgttttacattttcttcctatttgattcatctttgtcctgcaacataaatatgctacttttctaccgataaaaagacaaaatggaatttaaatctggcctggacttctcaaaaaagtcagtgtgatgaaaacatgttctagataaaacagaaatgagactgggcatggtggctcatgcctggaatcccagcgccttcggaggccaaggcaggagaatcacttgaggccaggagtttgtgaacagcctgggcaacatagtgagaccccagatctactaaaaatttaaaaattagctgggcatggtggtgcatgcccatatgtctggaggctgaggcaggaggatcgcttgagcccaggatttggaggctgcagtgagctatgattgtgccactgcactccagtgtgggtgacagagtgagaccctgtctctaaaaaaaaaaaagagagacaagatgatcaggatgagcgcagtggctcacgcctataatcccagcactttgggaggccaaaccaggtggatcatatgaggtcaggagttcgagaccagcctggcctagatggtgaaaccccgtttctactaaaaatacaaaaatcagctgggtgtggtggcgcacacctgtgatcccagctactcgggaggctgaggcgggacaattgcttgaacctgggaggcagaagttgctgtgagcaagattacaccactgtgctccagcctgggcaacaggaatgagactctgtctcaaaaaaaaaaaaaggggggatgatcaaacacaatgcatcaacctcccggagccatataaaccctaaccctaacccaggaagcaggcaagcctgtgtgtgagtttccactctattgctggtaccactcggctctggcaacccggaaggccaccttcccctgttgttactgtgtaaggaggaaggagcactggtttgcaagtcagaagcctgggttgaagcctctgctcgggttcctgctggctgtgggaatgtggggttacctttcctggctggcctcgtttccttcatgtccaatgcaggggttccagtcacatgcattgggcaccattacatgtccaagctgtgccaggatctagaaaaatggctggactcaggccaaggggccttcctgtctggcagtgaaaataagaggagataccaagggccctgagtctggaggggaagtcatgagcacagggcagtgccagggcccgggagctgccacagaggagcccaccttggtgacagacacctgtaggcacatccgtgatgcccagtgcccaacacagggaactggacaaacgtttcatgcacgactcttttttcccttcttggctaccttgaggaccttgattataatagttatcctttttttctttttctttttttgagactcttgctctgtcgtccaggttggaatgcagtggcaaaatcttggctcactgcaatcttcacctctcaggttcaagtgactctccttcctcagcctccctagtagctgggattaccggtgtgcaccactaggctcagctaatttttgtatttttactacagatggggtttcaccatgttggccaggctgatcttgaactgctgacctcaggtgatctgcccacctgggcctcccaaagtcttgggattacaggtgtgagccactgagcccagccggattataatagccttttcatgcaccaggggctttatactcattatctcatttcattcatatgagttgaagtcagcttaccccccatttcacagatgaggaaaccaaggcccagagaggttaggaattcgtccaaggtcacacagctaggaagtaggattcaaacccagacagccaggctgtaacacctaggctcttctcaggctcatgcccttcccaggggtctgggaagccctgacctgcagcctgtcaccttcgtttaccccccagcctccaggatattatgtgtgcaccggcgtgggatcctggaactggcaggaattgtgggttgtgttagtccctagactcccatcgcctatatgaaatatggttccttttgtggcttgggaggccatggccagccctgcgatgccattgactggtgagtgcatgcctgggaccaggctacaaaatccctcacactctggggtagtcaaggcttatgaggaagtacccaaaactgaagctggggtttggtccagggagatcccagtgtgcagtactactttgcaggcaggcagaggcctcttggataacatggccagtgaagccagatcttggtaccagctgccccttaccctggccatgggctgaaaacgttgccttaaaaaattggccaggagcggtggctaactcctgtaatcccagcactttgggaggccgaggtgggcagatcacttgaggtcaggagttcaagaccagcctggccaatatggtgaaaccccatctctactaaaaatgcaaaaattagctgtgtgtggtggcaggcgtctgtaatctcagctactggggagactgaggcaggagaattgcttgaacccgggaggtggagtttgcagtgagttgagattgcaccgctgtattccaacctggacaacagtgccaaaccctgtctcaaaagaaaaaaataataataatataaagtggccaggtgtgttgactcatgcctgtaatcccaccactttgggtcgaggcaggaggatcactggagcccaggagtttgaaacgagcctaggcaacagagtgagaccctgtctctatattaaacacacacacacacacacacacacacacacacacacacacacacacacacacacacacacacacaaaggcagccagactatgcactaggaactgccctgggaatctctttgtgttctcacaacaatcccatttcacagatgaagaaacctaggcacagaaatattcagtaacgtgtccaggtgcggtggctcacgcctgtaatcccagtactttgggaggctgaggcaggcagatcatgaggtcaggagttcgagaccatcctggccaacatggtgaaaccccgtctctactaaaaatacaaaaattagctgtgtgtggtggcaggtgcctgtaattccagctactcaggaagctgaggcaggagaattgcttgaacccgggaggcagaggttgcaatgaaccgagatcacaccactgcactccagcctgggtgacagagcaaaactccgtctgaaaaaaaaaaaaaaaaaaaaagaaatattaagtaacttgtctgaggccacttagttaccaagacgtgggagctgggacttgaacccaggcagtctggctggattcatgcctgcagcctctgcactcctgctacttactgtgtgagaagcgcctgttctgtggaaggttgtgggctgagatctttccatgagttccactcatttacccccaaggctgttcttaaagacgggcatgacagttatgcccattttacagatggggccctgaggctcacaggggcatgccactcacccatttccacaaagctatagttagttagcagagggcagaattcggccgcctctcccctagcttgaaggctgtgattgacacagaggtttttttgttgttgctgttgtttgttcctttttcttttttttgagacagggtcttgctctgtcatcccagctggagtgcagtggtgcgatgtcagctcactgcaaactctgcctccaagatgcaaatgattctcgtgcctcagcctcccaagtagctggaattacaggtgtgcactaccacgcccagctgttttttgtagagatggggttagtagagatttgttttatagagacggggtttcaccatggtctctactaaaccctgtctctactaaaaatacaaaaattacccaggcgtggtggcacatgcctgtagtcccagctactcaagaggctgaggcaggagaatcacttgaacctgggaggtggaggttgcagtgacccaaaatcatgcactctagcctggggtctcgcttttgcccaggttagagtgcagtggcacaatcatagtggctcactgcagcctcaaactcctgggctgaagggaatcctcccacgtcagcctcccaagtagctaggactataggcatgtgccatcatggcgagttaattttttgtgtgtttttattgtcttgagacagagtcttgctctgttgctcaggctggactgcagtggcatgatcttggctcaccgcaacctccacctcctgggttcaagcaattctcctacctcagcctcccgagtagctgggattacatgtgtgtgccaccatgcctggctaattttgtatttttagtagagacagggtttcgccatgttggtcaggctgctctcgaactcctgacctcgtgatccacctgcctcggcctctcaaagtgttgggattacaggcatgagccactgagcctggcctggtgagctaatttttaaatttgttatagagacaagagtctctcttatgttgcccaggctggtctcgaccccctggcctcaagtgatcctcccacctcagcctcccaaagtgctgggattacagatgggtgtcaccgcacctggcctccgaggaggatttcattataaacctgccctgaagggagggaatccaattttacgagagggtgtagcctggtgaggcctggatgacctccggaggcaggggcttgtgcctgggctgaggcctaagggacaatgggcagacatgaagttgccccaggcagagggtacagtgtgggcaaagtcaggaagtggcagggcttggatcactccaggaagagagaggagtcatgtgtcacaggagctcgagacccagagagtgaggcaggcaggcagggaccaagcttgggcacagccaggaaggcaggacagggcatggtggggccaatggaatcattacccaagacgggcattttcagggaaacagcttagataaggccaggcgtacagtagctcccacctgtaatcccagcatttggggaggctgaggtaggaggactgcttgagcctgggagttcaagaccagcctaggcaacatagaccccatatccacaaaaaatttaaaaaaggagtttgtgttcctgtagtagcatacttgggaagttgaggtggcagtatcacttgagcccgggagttcaaggctaaagtgagctgattgagccattgcaccccagcctgagcgacagagagatatgctgtctcaaaggaaatacaaattaaaaaaccagccgggcatgctggcgtgtgcctgtagtctcagctacttgggacactgaagtgggaggatcgcttgagcccaggagttcaaggctgccgtgagctatgattgtgcctctgcagtccagcctgggcgactgcagactgcaggacttttttaaagaccctgtctcttaaaaaaaaaaaaatcttagataagaggatgctgtgcctccctgggggtcttcagtcacccatggtcctggcaagagaggagggccaggagagagcttcacccacctgctgtcctgcccgtgtgacatccgcaggtgctgccatggccacgactgttgttacactcgagctgaggaggccggctgcagccccaagacagagcgctactcctggcagtgcgtcaatcagagcgtcctgtgcgatgagtccccagcagcaccatgccacccaccccgagtatcccctgggcaccctggcatagccagatgacttccgtgcccctgttgcaataaccactgcttccaagtctctgtagaccaccccttgggtatatctaatgtaagtgatatttattttatttatattttttgagtcagagtctcactctgtcacccaggctagagtgtgctgacgtgatcttggctcactacaacctctgcctcctgggttcaagcgattctcatgcctcagcctcccaagtggctaggactacagacatgcaccatcacgcccagctaatttttgtatttttttcagtagaggtggggtttcaccaagttggccgggctggtctcaaactccccacctcaagtgctctgcccgcctcggcctcccaaagtgctgggattacaggcatgagccatggtgtctggccctaatgtgagtgatctttaacactgagcacttgaaaaagaaaaccctgaagaaacctaattattcgatgtctggacgacaaggaagaagatagaaatggcatcagataataaacagtgtaaatgtttgtttatcagaaaggggctggtggtcgggacaagtaggaggatcgcttgagtccaggagtgcatctctacaaaaaagttaaaggattttttaacattggccaggcgtggtggcacacatctgtgatcccagctacttgggaggctgaggcaggaggattgcttgaagcccaggaggttgaggctgcagtgagctgtgatcgagccactgcactccagcctgggtgacacagcaaaatccagtctcaaaaaaaataataataatattttacataaccaaccacttctaaagattaaaaaaaaacccctatgattaaaaacctcaggtccctcaggcaatcataccagatatcgaaacaaagcaataacataaggactgcagtatttattttatttttatattatttatttattctttgttagtttttggagtgtgggttttgttttgttttttgaattttttattttgttctactcggttttattcttattgctcaggcttgagtgcactggcctcttctcagctcaacctccgcctcttgggttcgggtaatgatggttccacgtcagcggccctccgcctcttgggtttgcgtgacggttccacgtcaccgaccctccgcctcttgggttcgggtgatgatggttccacgtcagcggccctccgcctcttgggtttgcgtgacggttccacatcaccgaccctccgcctcttgggttcgggtgatgatggttccacgtcagcggccctccgcctcttgggtttgcgtgacggttccacgtcaccgaccctccgcctcttgggttcgggaggtggttccatctcagccgccctctgcctcttgggtttgcgtggtttttctgcctcagcctcctgagtagctaagggaggtgtcttgagattatcatcggctgagggtggaagcggcccccgcagacgctcggcaggtgtcttgatattatcatctgctgagggtggagctgagggtggaaggggagtgagctgacgctcagaaggtgtcttgagattatcatccgctgagggtggaagcggcccccgcagacgctcggcaggtgtcttgatattatcatctgctgagggtggagctgagggtggaaggggagtgagctgacgctcggaaggtgtcttgagattatcatccgctgagggtggaagcggcccccgcagacgctcggcaggtgtcttgatattatcatctgctgagggtggagctgagggtggaaggggagtgagctgacgctcggaaggtgtcttgagattatcatccgctgagggtggaagcggcccccgcagacgctccccgcagacgctcggcaggtgtcttgatattatcatctgctgagggtggagctgagggtggaaggggagtgagctgacgctcggaaggtgtcttgagattatcatccgctgagggtggaagcggcccccgcagacgctcggcaggtgtcttgatattatcatctgctgagggtggagctgagggtggaaggggagtgagctgacgctcggaaggtgtcttgagattatcatccgctgagggtggaagcggcccccgcagacgctcggcaggtgtcttgatattatcatctgctgagggtggagctgagggtggaaggggagtgagctgacgctcggaaggtgtcttgagattatcatccgctgagggtggaagcggcccccgcagacgctcggcaggtgtcttgatattatcatctgctgagggtggagctgagggtggaaggggagtgagctgacgctcggaaggtgtcttgagattatcatcggctgatggtggaagcggaatccgcagacgctcagcaggtatcttgatattatcatctgctgagagtggagctgagggtggaaggggagtgagctgacgctcggaaggtgtcttgagattatcatccgctgagggtggaaggcaggtgtcttgatattatcatctgctgagggtggagctgagggtggaaggggagtgagctgacgctcggaaggtgtcttgagattatcatccgctgagggtggaagcggcccccgcagacgctcggcaggtgtcttgatattatcatctgctgagggtggagctgagggtggaaggggagtgagctgacgctcggaaggtgtcttgagattatcatccgctgagggtggaaggggatggagcagacactcggcacgtgtcttgagattatcatccgctgagggtggagctgagggtggagctgagggtggaaggggagtgagcagacactcgggaggtgtcttgagattatcatccgctgagggtggaaggggagtgagcagacactcgggaggtgtcttgagattatcatccgctgagggtggaaggggagtgagcagacactcaggaggtgtcttgagattatcatccgctgagggtggaaggggagtgagcacacactcgggaggtgtcttgagattatcatccgctgagggtggaaggggagtgagcacacactcgggaggtgtcttgaggctcagggagttatcagttatagaatgttgttgagttggaggaggtggctggtggcccatcctgttttttaaagtttcagctgtgaggtagggccagtagggcaatcctgaagaatgacgatgctccgctgccgccattctgacctgtagggccaaaggagggaatgttttcacacatattcatttgatggacaaaattaccgccaccaacacagtctgcaccttctgttgctggtgatagatttttgcacctttccatcctccaggtttcaaaatagcagtatcagtgtcataatatcacccttccactgagtactgccgacagctggagggtaaaggaaagtcattgggacacactgttgtctccacatgccactgtgtctgtctgcaaatgtaggcaggctggggtcctgccccagggaagacagagtcataacagagtaataaagaagcatgtttgagacacaggagtgtctatgtctatcctcattcctccctcacagccatcaccagagcatgtttcttgcaccaggtcaacagacagtaagagacagtaagagaggcatgaaaagcccactgtccacacatgttgcagcttctttttggagaatgttttccaggccttttatgttctgtctctgactctcagaactctgcaaggtcagtgtgaccaccctgctccaaatctaagaaaacagaggtttccagaggaaggagaaattgtgcccagggtcacacagcttgcaagaggcagagtggaagttgattccagctctgcctgcaggaccctctcatttcccctctgtttcccttcttgacaaaggatcttcttcactctggaggtgccacccatgagaacaaagagctctggagagatgtggattcctgaagagctgcaggggaactgggagagggttttctgacagaacaatctcacctcaagaagtcacttaggcatggctgtaatatttcttttcactcccaggtaataccaaattgtaagtgcactaggacataaagaatacttttgtccatggaaaaatgaggtgggaattctaaacaaagcaagttttaaaactgtgtttcacttcaagtgtacaagtcccatcacgtgtaatcataggactcggcagcttttgaaggtacagaggccacacaagaaccagcttagctgagcatcatttaaggccttcatttggaattgtccctgtgggtaataagttacattcactcttcactagtttacagtcagggcccatctgctattacaaatacggaacctctgacacttagaatattagatcaggggccccactgggtggggatgaaggtgtttttgcacaacacggttaccaacagggatgggactgtgatgcttgtaggcagcctttctctctgccatctccctctgcagggcttgagcacagagctgtagggagaaaaatgtatccatgtcctgacctggcagactatgtccaaaagcaaggaaaacaagcaaacttacccagttgcaaagagcctttcttgcagaaggggggatctgaaaaagccaacacatgagaaattgaatgttgagagagtctaagggccgtggcatcatctgcatcagcactgaactatcctgcaactgcagggaggaagctccttactttgcatttgtggtagtcctctgcccgccgccgcaactcttgcgcacgttgaaacattttcctatggattacaatcactttcatcagataaagcaccactttcaggatgattttaaataatctgccatgtttctgttatcctcacaactgtacccttacacaatctatctctacctagaaaacgtatttcagatggctataagagtacagtctgagccggtcacggtggctgacgcctgtaatcccagcactctgggagggcggggcagatggatcacgaggtcaggagattgagaccattgtggctaatatggtgaaaccccttctctactaaaaatacaaaaaattagccaggcgtggtggcaggcacctgtaatcccagctactcgggaggctgaggcaggggaatcacttgaacctgggaggcggaggttgcagtgagccaagatcacgtcattgcactccagcctgggtgacacagcgagactccatctcagaaaaacaaaaacaaaaaaactgtacagtctgatccaaactgttgctgtattgattcctcctcttgcttactgcctgctgacttctgagatgatagtttccttccccattctcagtacatccctaattcatccttcattgagcatcttttatcataaagctgtattctctttgtattaatatccttaccgtgtttcacagggcagaaacagctgggcttataaacaggcatagtccttttgaaggatgtggttgatcctacaacaacacactttcctaaggatgacaacaactcaccccacccctagaatggctggtatgaaccgagtttccacacagtctagctggcaatggggtcaggagacgttttgctacttcacatcttttggtcactggtaaatattaaggtactttgttttctgttttgtgaactctctctcgctctctctcacgatatgtcttctgaccgtttgtttctatttctgcatttactgggtctaaatactgtacaaaggttaaaaacaacactccaatgggcgtttcccaggagggtggggttcagtttctgaactcacttgtaggtgtgtatttctttcatatccaatttcccattttcctctgcctctgatacctgcctctccttttctgcatgctcacattctttcacgcttagtttcctcagattagaagggagagaaatgcacacacatgatccaccagcccgtgtgggattccctctgcccttctggcatctgaaggctgtgattcaaagatcccccctgcaaccttcccacaaatgaaccaactgattctcacaaccgaagggagaattgacacctcccattgagggacaaaaaaaagtcacactctggcctgctggcaagtcacctgtcatttccagctcatcttcatagttccatagttagtcctattctttagtaaatataaagactattaaaagcttctatgaggtgcactatgtgtgtctctggggtcagtcttgtgcttgacacagcgaaagctcattttagttcagtgtgaaaaaccagacctcaccaattcatcacaactaactccatcggaagcagaggattgctcctcatctgactcctcctgtgtgagacctgattctcagtcagaggctgatgccggaactgagaccatcagccatagagagatccttccagaataaccccgcagttcactactgcactttgccatgattcaggactggaactcttgtcatcgactttaaagatcctggttgagagaaaaggcaatctgaatgctgggcgcatctattgaattagaaatgatcggaatggctcctaagtcagggtgttatgtcctgaaaataggtgacaacggcaaaccatccaccctggtgttgactgactttaacaaggttcagttcacagagattgagggcagaaaaaggaaacggcctaaaaagggtaagtttgctgtgttgccctcactccacttgattcatggtcctgatcctaaggatctcacctgatacttggttttataggaaggatgtgtaaaattcccagaacgctaggaaacaggggcgaaaacacttcaaagagaaagttaatgaacttgtttctgaccacaaggcatccttcagcacatgctgtctggagtggcctcaaacaaggagtgtgtggtgtggtgctgagaatgcaatgggagcagggtcctgtccccacgctaaagaagctcacagcttaatgcaaatgagaagccagtgaggacatcactactcctgctgtgcacttgggaactagaaacacaaaacctgactctggagggaagctaaggaagcattctactcttgagttgacataagtgcatctgaagcttctgatctccgatgagaacaatgggggacaccaaacagaatataaaacccatgattgaatacatcaaattgctaacatggcagtaaacagacatgaggtgaagatggagaagaaggaaacccaggacgaaagtcagcctcgcatttggaacccatttccctgagtttcattgctgaattccagaaggaactactgagatgcaaagaagcacagcagcttttgcacacatgcgtgggattagatggaaaacaagtggattgagggtctgccaatgaaagcgacccgtactgaagtccactggctctggttgagacccagaagagtcatgcatcagaataaaggtggacaggaaataccctggcctttgtagggactgagcctgcaccgacgacttcaattgcagcctgtatggaggacccctgaccatcccccagaagtagactcccatctcttctgcagcaagataacatgctactaggcctcaattcattgctaaacattttttaacaagtatctcacatttaacaaaaaaagatcagtcatatggcagcaaaatacaatgtcatatgaccaaaacatgaaagactgtgaaaatgaatctggaggtgacccaagcattgaattcaacaatccaggctgggtgcggtggctcacactgggaggctgaggtaggcagatcacctgaggtcaggagttcaagactagcctggccaacatggtgaacccgtctctactaaaaatacaaaaattgggccgggcacggtggctcacgcctgtaatcccagcacattgggaggccgaggtgtgcggatcatgtcaggagttctagaccagcttggccaatatggtgaaaccccgcctctactaaaaatacaaaaattatccgggcatggtggcatatgcctgtagtcccagctactcaagaggctgagggataagaatcgcttgaacctgggaggtggaggttgcagtgagccaagatcatgccactgcactctagcctgggtgacagagtgagactctgtctcaaaaaaaaaaaaaaaaaaaaaaattggtcaaatgtggtggcacacacctgtaatccaagctactcgggaagctgaggcagaattgcttcaaactgggaggcagaggttgcagtgagccaagattgcaccatagcactccagcctgggcgacagagcgagactctatctcaaaattaaaaaaaaaaaaaaaaaaaaaaaaggctggctgtggtggctcacgcctctaataccagcactttgggaggctgaggcaggtggattacctgaggtcagaagttcgagaccagcctggacaacatggtgaaaccccatctctagtaaaaatacaaaaattagctgggcgtggtggtgggcacctgtaatcccagctacttgggaggctgacgcaggagaattgcttgaacccaaaaggcagtgagctgagattgtgccattgcactacagcctgggcaacaacagcaaagctccatctcaggaaaaaaaaaaaaaaaaaaaagagaaaggaaaaccaatgccagtactagcaactcctcttcctccgaaaaaatgaaaacaagaatgtaggaagggaaaggaattatacagcttaaactaatgaagcagaaaggacaaactcaattttgaacccactgaatttgccacaaatattgtagaaaatattctcaaggactttacagttgtctactttgattggcacatggttcatacaacagtatttgtgtcaaggcacatcttactgttttctggcggtcttcctctttccattgattttgtcatgatggttgattttcgttgtcaccttcctcttacggattttagctctaacttttgtttccacatgtctccgtagagtaatgacgtctttcaggccaattttatttcctcgaaaggaagaaactcttttctttgtgtgcatacaaatggacctcagcccttggtgagagtgaggagaggagaaggtgagaaacctgagggcaagaagctgttctttccctttccagggcaaactcatttccacactatgcggattccaacagagccataccttcctgtctacggcggttggacctccaggctctctgctgtacatccgtggatccatcatgtccatttcgagaccagaagatagtcttcaggagagacacctaggaaataataatataagaatgacggctgggcacggtggctcatgcgtataatcccagtacttcgggaggccgaggcaggtggatcacggggtcaggagttcaagaccagcctggccaagatggtgaaaccccgtctctactaaaaatacaaaaattagccgggcatggcagcgggcgcctgtaatccaagctactcgggaggctgaggcagagaaccgtttgaagctgggaggcggaggttgcactgagccgagatcacaccactgcactccagcctgagcgacagaatgagactctgtcacatacacacacacacacacaagaatgacatgaggctggcacggtggctcactcctgtaatcccagcactttgggaggccgaggcaggcggatcacctgaggtcgggagtttgagaccagcctcaccaacatggagaaacgctgtctctgctaaaaatacaaaattagccaggcatggtggtgcatgcctgtaatcccagctagtcgggaggctgaggcaggagaatcacttgaacccagcaggaaaagcttgtggtgagctgagattgtgccattgcactccaacctgggcaacaaaattgaaactcttgtctcaaaaaaaaaaaaaaaaaaaaaggccagatgcggtagctcacgcctgtaatcccagcactttgggaggccgaggcgggtgaatcacaaggtcaagagatggagaccatcctgggcaacatggtgaaaccccgtctctactaaaaatacaaaaattagctgagcatggtgatgcacgcctgtagtcccagctactcgggaggctgaggcaggagaactgcttgaacccaggaggcagaggttgcagtgagccaagatcccaccactgcactccagcctggtgacagagtgagactccgtctcaaaaaaaaaaaaaaaaaaaatgacatgaatatacttcacacaactgaactgtacacttcaacacggttagatggtaattatcatcttataagtattttaccacaggttaacatgtttcacaacttgaaaaggaagtaattaccttcagctctctgagttctagaatttgtaacatttcatcccctgctccttcctgatctgcactggagcatcttccttctgtccctgctctactcagagttcactttcccttccctcacatcagcttcattgaggctggtttgaacttaacgcaaaacattctcactaatgactgaattcccaccaagatttccatattatcacagtatgcttttaatcttctaagatattaaatatttcttctcatcatagctaaaatgcaatgcaaatcccatctcagatgtgggtcagatacctatgaatctcctgaggtggtcattgaaatgactttttcttgagacagagtgtcactctcaaccatgctgaagtgcagtggcgctaccttggctcacggcaacctccacctcccagattcaagcgattcttgtgcctcagcctcccaagtagctgggattacaggtgcctgctaccatgcctggctaatttttgtctttttagtagagatggggtttcaccatgttggcccatctggtcttgaactcctgacctcaaatgatccatctgcttcagcctcccaaagtgctgggattacaggcatgagccaccacacctggcctgaaataatatctttcaaattctttgtagaatttgttttttcctgatttctgcacataggataaaaaaaaaatcatgtactaggatttcgagagaagcaatgggtaatctaaaaagatgaaaagagcaaccacgtcaatcccacagctactgctagatttcataggaaaggtagctggcccagtttggagctaggggaaatgtcaaacacatgaagaaatgagaagccaagaaatgccatcacgcatgaatgcttcatggcacccatgatgtccctgcttaggaggtaatggtatagatgactagatgacaaggacaaagatgagaggtgcgaagttgtccaagtccaacagctcaactgaactttcctaagtggaattgttaaaaagtggtaaatttaaaaacttcccctggctcacgtggtggctcacgcttgtaatcccagcactttgggaggctgaggcgggtggatcatttgaggtcgggttttgagactagcctggccaacatggtaaaaccccgactctactaaaaatacaaaaattagctgggcatggtggtgggcacctgtaatcccagctacttgagaggctgaggcaggggaatcacttgaagccaggaggtggaggttgcagtgagccgaggtcacaccattatactccagcctgggcaacagaaggagactcgtcttcggggtgagaaaagaaaaaaaaaaaagaaaaaagcttcctccaatttataccgaaaattctctgttcaggactaagtggcatagagaatgttaaatgtgcctagatatcttcataactcatatattttctgttttctacatatcttgaaaggcagtgccaaatgacgtgtaattatctaggtggtaaaactgaaacatacttcctcttcccttgaatataaaaaagcattgtggtattagtacttttatcttggatcattgttcagaaggaggttcagcccccagacaaccacatttttactgtcatgaatggcaagacaaaatgtagagctcaacttacccaaaggaaaaaaggctcaaaagacaaattatggcacaacttagcagccaaattcttaccaagtacagacttttgacatactgatctctctccagttccaagtcggaacatgcactttgaatgatgtcattcaaaattaccctgcccagacacacttttcattgattctcttggagggcagttctaagagtctctggggctttctctgcatcatgagacgcagtgcagttctgcccttcaccttccggcagtttgtcacctcgtccctatgacctcacaggaactttgtctcaggccaattgtttgttccttggcctctttcatttcccctaaaaatcatttgctgcccctctaaatggcctacatctccatctatctccctctcccctcagaagagggtgctctttaagcatcagccatccggcccttctagcagtctcatttttcagctggttcccatgtttatgcctgttctatgtttttcttttcctgttaagctgtctgttgtcagctcatttctgcagtgaatcttcagagaagagattggaagctttccttccacccatacgatagaactacaaagcagaagagtttagaaagaatttcctatttaagtgacgaaacctcatactccatttgtgataaatagcacaaaggttaaaaaaacttatttttgaccaaaagctctgttgacattctattaaacaaacaccgacctatttaattttcataatgcaaatggcagatgttttcataattcttatactaataaatcatttccctgattttttgggtaaaaccacatattcataatgaagtccagaaatgtgaattgttttatataatttattcttatttgtgattacaagtatacctctacagaaagttagtatactcacccaaaggtaaactatccagagggtaatgacaactttataacttgtcggaaacgcaataatgacatgtaaccaaggacttccaccaaagtcagtcccacgatgatgatggtcagccagagtattgataacctggaataataatagttgaaataatgaaaaggtcaatgacactgacaatatttcactcagaaagaatcatccttagaaaccgtcaacctcctccaaaaggtaaccacatccctcagatatcaccgtgggattccactgctacaaaaaagaacagaagttagaagtcacatgtttttcagatggctggtagtgttttcaggcattgcaaatgtggggtgttgtctttcttggtataaagcagggatatccaatcttttgacttccctgcctatattaaaagaagcaaagttgtcttgagccacacataacatacactaacactaacaatagctgatgatctaaaaaaaacctcttttttttttttgagacagagttccgctccactcagtcgcccaggctggagtgcagtggtgcaatctcggctcactgcaacctccagctcctgggctcaagccattctcctgcctcagcctcccgagtagctgagattacaggtctctgccaccatgcccgactcatttttgtatttttagtagagatgaggtttcaccatgttggccagtctggccttgaactcctgacaggcgatctgcctgcctcggcctcccaaagtgctgggattacaggtgtgagccaccgtgcccagccatttttttgtttttgtttttgtttgttatttttgagatggggtctcactctgtcacccaggctggagtgcagtggtgtgctcccggctcactgcaacctctgcctctcaggttcaagtgattctcctgcctcagcctcctgagtagctgggagtacaggtgcctgacagtgcactcagcaaatttttgtagtttttgtggagatggggttttgccatgttggtcagggtggtctcgaactcctgacctcaggtaatctgcccgcctcagcctcccaaagtgctgggattacacgcatgagccactgtacctggccaaaatctcctaatgttttaagaaagtttacaaatttgtgttgaactgcattcaaaactgtcctgggccacatgcagcccgtcactcatgggtaagacaagctaagtataaagtaattatcttatcttttcttttctttttgttttgagacaaagttttgctctgtcacccaggctagattgcagtggcatgatctcaactcactgcaacctccgcctcccgggttcaagcgattctcctgcctcagctactgagtaactgggattacaggcgcctgccaccacgctcggctaatttttgtatttttagtagaaacagggtttcaccatcttggccaggctggtctccaactcctgacctcatgatccacctgccttggcctcccaaagtgctgggaatacaggtgtgagccactgcacctggccagtagttatcttttctttaaagttatttacttgttttttaaattgatgtataacattggatgcatttattatatatcacatggtaaaagaatccctctaaataatacttctctcttggattatatgaatctttgtcatttaaatctcagcataagtaaaaaaaaaaaaaaaatacaatgaagagattacttcattcacaaataagtatcaaattttagtgcttaaaaattaacaaggtgggctgggcgtggtggctcacgcctgcaatcccagcactttgggaagccgaggtgggtggaccacgagatcaggagattgagaccatcctagctaacacggtgaaacccgtctctactaaaaatacaaaaaattagcagggcatggtggcacgtgcctatagttccagctacttgggaggctgaggcagaagaatcacttgaacccgggaggcagaggttgcagtgagccgagatcgcaccactgcacttcagcctgggtgacagagcgagactctgtctcaaaaaaaaaaaaaaaaaaattaccaaggtggagatcatgaaaatggcatgaatagtgtgggatttctctaagattgttgatattaattccattagactcttatgtgagtgaagacgaagacttcccctgagtaagttcagacagcttctgataacatttctacgtcgattcctcaggatttaactatatattcttgaaaacatctcaattttaaatgtttctttcaagatggtgaattaaacagagatagcccttcaacaggttgaactcagcatatgctgagtctgaaatggaaatgatgaagttagagaaccatacaacaatggtaatgatttcagaaacatggtgttgagcagaacaaagcagacacaaaagagtacctatggcatggcatgcatctgtatacgcgaaattccagaataagcaagctaacctatgataagaaagagactggctgggaagactgagagttcactttctggggtgacataatagtgtagatcttggctgggcacggtggttcacgcctgtaatcccaacgctttgggaggccgaggcgggcggatcacctgaggtcgggagttcaaaaccagcctgaccaacatggagaaaccctatctctactaaaaatacaaaattagctgggagtggtgccacatgtctgtaatcccagccactcgggaggctgaggcaggagaatcgctcgaacctgggaagcagaggttgcggtgagctgatattgccccattgcactccagcctgggcaacaagggagaaactgtctcaaaataaataaataaataaataaataaataaataaataaaataatgtagatcttgaaagggggttggtttatgctggtgtatgtactttccaaagttagtaaacttacacttaaggttatatattttggccaggcgcggtggctcacgcctgtaatcccagcactgggaggctgaggcaggcagatcacgaggtcaagagatggagactatcctggcgaacatggtgaaaccccgtctctactaaaaatacaaaaaattagccgggcgtagtggcgggcgcctgtagtcccagctacttgggaggctgaggcaggagaatggcgtgaacccgggaggcggagcttgcagtgagccgaggtcccgccactgcactccagcctgggcgacagagcgagactccgtctcaaaaaaaaaaaaaaaaaaaaaaaaaaaaaaaaaaaaaaattagccaggcgtggtggtctactaaaaatacaaaaattagccaggcgttgtaatctgagctactcaggaggctgaggcaggacaattgcttgaaccccagaagcggaggttgcagtgagccgagatcttgccactgcactccagcctgggcgacagagtgagactctgtctaaaaaaaaaaaaaaaaaaaaaaaaagtcatcaaaccagatgacacaaatcaaatgacatttcactttgttttggtccattttctttgttaaaaacaagagtgcagcggggccatctcggctcactgcaacgtccagctcctgggcccaagcgatcctcccacctcagcctctccagtaactgggataacaggtacgcaccaccaggcccgactaatctttattggaattttttgtagagatggggtttcgctatgatgccctggctagtcttcaactcctggactcaagtgatctgcccacctcggccctctaaagtgctgggattacaggcctgagctgtgtaatttcatgccacgtgatacagcccagtaaaaaggaagaaaccccacgggtccagcgtctactcacagagatgcactgatggctgataaattccagtaggagcccaaagaggagccaaaagagcatccaccgcacccgcatgtcctggtcctttcagggcgccctgaggcggccaggacagaggtggaggtggcttagggcaggggggagggaaggggacgggaccggggccggatctgagttggggagggggaggggagggggaggggaaggggaggggaaggggggaagtaagggaagggaaaggaggagaagggggctgttgggcacctggaggaggtggaggaggaggaggagaagaagaaaggggtctgggaaaggatccggttcaaattaagttctcaagcgctggtggaaggtttagctacaggtcacggagaagatcagggaagcaacaggacacgcggggcaagggagcgtgaggcttaggagcaatcagagggagacaaaaaggttctgctatccaccaaaccttcttcggtctgggccctcccttaccaaccctggggctttatactccctctccaccaatccctgatgaccccggtggtgcctcacaatggacagtgcctcacaatggacaatgccaagtagcgcccgcatcattccaatgacccctcccccatctcagtctcccacactcctcccaaagacaggtcctctctggaaccttcacaaacctgatttctggtcctccccaaccagctccctgtccctgcttctgggcgctccttccttcctgagctcccagggttcctcaaggtcacttatggcgacaaaacataaaaaacaaatgatggcaggatggcaggaagaacctcatacccaagcagagtgccaggttttacagcctccgctcagccattcatatcctaagcaacaaaacatcagcagggtgcggaaggtcccgatagtaaaccatctccatcacatccatgtagccatccgtccatcaacctgtatctcaggaacaaatgtagatacattcattttaagcatgcctggtacatttacaaaaattaacctgacttattttgttccagcaaatctcaatatatttgagagcaatcaaatcacacagcatgtttctgatcatataactgtgctagaagtcaatgattaaaagctaattcaaaattattatttgcttggaaattcaaagtgcccttataagacataaacataagaaagaatccaaaatgaaacaagattgcctttcaactcaatgatgagatcataacatggcaataaaatgtctccctctggcctgggaattcctctttgtggcacaaggttgtgtgatctcaaatcaccgctaacccacctagacattttaacatccgaaaccgagtgatgacgtccttatctatatcatcttactgcctgtgtgtgtggactttaaattctgaacccaaatgagggggagaaaaccaagttgactttcatgactgagctctcagggacgtccaaggaatctgtgcatttcaagaaacaaagttcatcagcttctctcctaaggtatttgcccacaatacccagagggcttggcagcatcatgtgtgatgggtggggagctccaagcaggtgggcaggacccaggggcctggtgaccaggacagacccccactgtccatcaactttcctggccctgtcctctgctaaacttcccacaggccttctgcccgatcacacagagtatgcccaaactctctcaggcctctggcagctgaaaaccactgctttaaatccctttaccatttactatgacataaggttattgtaaacaggaaatattctattgatgctacaaatggaaagccaatgcctttaccataaatagaaaaacaaccctaagaagcaagcaaaacaaaaacaaaacgggctgggtgtggtggctcacgcctgtaatcccagcactttgggaggccgaggtgggcggatcacaaggtcaggagttccagaccagcctggccaatatggtgaaaccctgtctctaataaaatacaaaaattagccgggtgtggtggtgggcgcctgtagtcccacctacttgggaggctgaggcaggagaatagtttgaacccgggaggcagagtctgcagtgagccgagattgcaccactgcactccagcctaggcgacagagcgagactctgtctcaaaaacagcaacaactacaaacaaacaaaaaacagggttaacaaaagtatggaattcaattctttttatatgctgcagccatgttcctgccctagatttggctgggcatggtggctcacgcctgtaatcccagcactttgggaggctgaggcaggcggatcacgaggttaggagttggagaccagcctgaccaacatggtgaaaccccatctctactaaaaatacaaaaattagccaggcatggtggcacacgcctgtaatcccagctactcaggaggctgaggcaggacaatcccttggacccgggaggcggaggttgcagtgagccgagattgtaccattgcactccagcctgggtgacagaatggaatgagactctgtctcaaaaaaaaaaaaaaaaaaaaagcagccctagatttcggttgtggtggttgtaaaaggagagaccaagtaagtgggggttgaagtcagattagagcaaaagtgaatggcagagagtactataatgtccatgaagggctgctagagtcaccgtgatcatagcccaagcagagatagggaaaggaagatgtgagcagagtttggggtctcgaacaatggaggttattcgtgcagcccaggaaaggctccccaaagccaggatcaacctcccttggaggcggtccctcatggaggcatggtcaggcaccttagatttgagaacagctatgttgctgctgaccagctgtgtgaccctgggctggtttccttccacacaatgggagtgccaatggctgcatgcatgcaaagaccgtctgaggataggaggaagcaatctgttgagcacccgtgtacctgagtgtcatcacctcccaagggcatccttcgttccagagctggcgccttggaaggcccttggtcactgaaggcagtgatgatggtaacagcagtaaatcatcatttacggctgatgagggaaggccaggggtagggctcctaggtcctggataagaatgagggtctgggcactcctggggacagctgagtggtaggactcctgggtccccagggggaaggtccatcttcagtggcattgggcctaggctgggatgctgagttatccactggagcatcagcagtacaggcaggcacagaggcagtggatccatcggaggtggcaggtgtaggatcgtctggtgagcaagtagagtcaccaaatctggctgaccactacccccactacccccactatccccacagacgatgccctgtcccttgcctcatgctccggcagggtacaggctcgcacctggggcctcaaggagcatctctctaagacctctgtgtcctggtcattgaatgggcacttgagtcacccagggccattggaacaaagaggaagaatcaggccccacgatgttttgggagagtgtttagcacaggaaaatgcgcagaatacatgcacgacacgggggcactgtcagtgtgggagcaatggtttacaacctccagccctaatctgagcactctcacctgtgcaatctgaaaggaacaggagacttgcaggaaagacagtgcctggatttaacttaaaggaactaaaaatgttggaatttttactcttgatatccttccaaatcaactctctcaatgttcccatcctcaaaactatcatatggggtaactgaggcagtcagagatttactgactcaatgtcactcaattgattctgagttcactgctgattacatccgaccaaactgctttttctgaagtctactccgtttaatcatgctggtgatgattttgtgcggctctgggacaaactccacctggctgaagataaagcaaatctgcggtgacttagtcctcctgtcatttcccatcagttccccactctcctcctctgcccctccacagtctcccatgcaggctgacaccatatgacggccttaatggagtccaccgagtatttcaggttctctcctgggccacttgaaagtggatgtacccatgggatttgctttgacccaggagatgtgagtggaagtgaagcgtgtcacctcgaggcaaaagagttgggagccattgagacgggccactctctccttcatctcttagagcagctgacagctcccatatggaggctgctcctttattctcgtggcaggatgagggcatgtggggcacagggcacaggagagccatggaggatgtgcagcatgggcaggaaaagagccttcagtggtgtacatttccatagtttggggctgtttcttacctacagtgatacctagcccatcctagcaggcatgcaccatctactccacactctgtgatgcagactagcctgccgtcagaacacgaactggtggtcagacacaggtaggtttcagttccagctctgcctcttattgactgcaacctcaggcttaactttcagtctctgagcctcagtttcaactctgtaaaatgaggtggctataccatctcaggttgcagagagaattaaatgaaatataagtgcatgtagagcattgaacccagggcctggcacacacagtgagtacacaatgttagccaggtagcttcataatgcatactgattgttaatattcagacaatgcagtaaagtgttaccaaaaataaaagtaaacttatttgcatatgtattctttcaatctttatttttaaacagggtaaaactatgcatattctttcatagccagtgtttttctcttcatagtatattgttaaaataattttacttggaccgggtgcagcggctcacacctaaagtcccagcactttgggaggccgcggtgggcagatcacgaggtcaggagttgacacgagcctggccaatatggtgaaaccccatctctactaagaatacaaaaattagctgggcatggtggcacacacctgtagtcccagctactcagaggctgaggcagaggaattgcttgaacccgggagacggaggttgcagtgagccaagattgtgccattgcactccagcctgggggacagagtgaaactctgtctcaaaaaatatatgtgtgtgtgtgtgtgtgtgtgtgtgtgtgtgtgtgtgtgtgtatctatataaatctcaaaaataaaagatcatttttgagattatcattttaaaagacaagataatgttcaacttaatgactaatttaattattactattggactttttgtagactaaacagagcattcaaaacaaatgaaggagaataaaaaatatgtattacatgttgtaaaataaatgtgatgtggttaactcttttattcaaagttatagaacatatatatgtactatagaatgtatttcttattatgagtcatgttaaaaagtagtttagaagctgttgatttgaatttccttttcaaattttgcaggataatttttttttttttttgacagagtctcgctctgtcgcacagtctggagtgcaatggcgtgatctcggcccactaaaacccccacctcctgaatctaagcaattctcctgtctcagcctcctgagtagctgggactacaggctcacaccaccatgcccggctaatttttgtatttttagtagggacgaggttttgccatattggtcaggctggtctcgaagtcctggcctcaggtgatccaccagcctcagcctcccaaaatgctgggattacaggcatgagtcaccatgcccagcctaaacttggcaagataataaataacctttttaagtgtcgttgggcacttgtctggttgtttttctttaggttaccatgccagcaatgattccttttgagtttctgacagaagatagtggttttcatccaaataagtcaactactctaccccatccctaagccacttgtatggaaagaaaaagaggaagaagccagtactgtgactgcgtaagcttcccccagcatcacccgctatgagatgtgtggcagctgagacccgggaactgctcaagggcaccaggccccatctgtctgcactcactcaccttcctcaggtactcgcatgggcatgtcactgactttacatgctgctgcagctccttggtgagctggccctggtcatgggacaggaactgtggggtcaggacaatagagagcttcaccatttgcagaatgagaacaggggctcatgatgagtgccaacctattagataattttaaaaaaaaagtgttgaatgagtggaaaaacaaggtgatgtttgagtctatagtggtcaagggcttcagaaaaggacagaaccaagttcaaattcctgtactttgaatttctacttcatgccatgcaaaattactttaccccttttaacctcagttttcttctgtgtgaaacaggaacaatagtttcattcgtcattcagtttctctcaaggtttcacgagatcatacctataaaacatccaagtcatttaaatgtatcatcatttctgtcataattagtgggatccatttcactattattggatatacagttctgtgcctgaaacctacaaaaaaagaaaatgttaagtctaaaaagcattagtgatttctcatttttatattactaattataaccctatttaatcacacaaggccttgtccgtggcaggtgctcaataaacacttgtcgaatcaatgcatgtgggctccggagccacactgtttagattctattctgcctccaccacttatcagctgtgtgatctgggtaagataattcacctctttatgtctgcacttccctctccataaactatatataatgagaatccttagctcattcggttgtggtgaggggtgaatgatttggcacacaggaggggcttgttaacattagctgtgatgatctccttccaaatcttcattttcagagccacagatgaggccacagtgcaaccaggtgaccttagagtgtaagtacacgatcgccagctatgctctatctccaccataggtccaagactgggtagttctggcctggaggtttctgctacatctgccttctcagtgttcacctaaggacttttgtattttcctcctcgcatccccacagatggggttcaggctgccggacacagctgggtgatgccagggcagtggtcacctgtgccagccccgtgaggtagctggaggatcattgttccttccttctcgggctctgggcagatgccagggctggggtgacccatgccctcaagtttcttgctttggtgggccacattttcccttggcaaagagggtaaaggtcacaggatgccagagagctgtgacttctctgtgccctgggcccaaactatgaagacctgacacactatgctaaaagtccaaggctgggtgctccccagagcttcttgcctcaccgcttctgctgagggaggaatgaatactatgtcctcccagagctttgggagcttgtagcaagcagcctccccagcgcaaaatctcttggaaacctctaactgtgtctgaaacattagtgcaaatgttgcatcctatttcccatatgtccgcatgttttagaaaaaaatcctcaatttcctaaatatgcaagaaaaatcggtattgtaggacaatgtgactttttaaaaaatgttatttaaaaatcttccccacctccttttctgccctccaagactgccaaatacttgttgaacatatattattaaatgcctactacatgccagccatgattcatggtcttggggacacagcagagaacgaactgacaggattcctctcttatgtaactcacattcttatatgataatgataagggttaacattaattaagctgtcactgcatgttagtcacggtgcagtcattcccacacattattacacttaaacctgccagcaagcttgcaaggtagttgtttttcctttaaaaactgagtctcggaatgatgaagcactctgtccaatgtcacacagctagtaagtgtggagaccttgcatccaatcaatgcccgtctcattctaaaggccatgttatgtgttctccagcccatggagaataattttaacacagtcaatgaaatttctacacaacaatgttcttgtctcaagtccaagaatgcctcctacacctcctataatactggctttctggtgagtaaagatgccattctcatgtgtaatcaggtggcaaatggagatatgaccaaagtaaccatctgcctacactcataaccctgtacacactcttcctgtgtcgattcaattcaagtaccccttttgatcacttagcaaatctgacctttaaaagggttagggtttttatatccatgtaagtttctgtattgctttggaagtctctggttaaattaatactcttttaatagtgacctgtgattctgttttgatcaagtgttttcaaacttgacgtctttgatgggtttctccagtgtcaaaatcctaaatcaagtctttttggcttaaaactaactttgggatttttttcagctgcatcccttggggagtctaaagaatgtatctctcatcttgtagaggtattaagtgattcgatttatttggtagattaaatgggcaggcattgtcaaatgtggcgatactgcatgggagggcactgtcaagtgaggtgacattagatctcatctcagttatatttatgggtatgttgttgatatgcgtgttccaaaaattgcatacatttatacaaatttaatatgatttgtaattttgatagttatgctaaatatttgctaaagttatatttgtataaacatgtcacgaatggctgggcaccgtcactcatgcctgtaatcccagcactttgggagacaaaggcacgtggatcacctgaggtcgggagttccagaccagcctaatagagtgaaaccctgtctccactaaaaatacaaaaattagccatgcctggtggcacatgcctgtaatctcagctactcgggaggctgagacaggagaactgcttgaacccaggatgcggaggttgtagtgagccgagatcatgccactgcactcccgcctgggtgacaaaggtagaatctatccaaaaaaaaaaaaaaaaaagttattatttctgaagattgtatgaaattcataaaagtctgctggccctgatatgatgctgtcagtcatgattctgattactgtcttaaaatgctgcacataagtaattaaatttccttgtgaactgggaagtttcatcagacttttatcataactattgtttccatcatccacagttactgttttgaattcttctctaaaaatatttgtaattggcaatagtccaaattttcttttgttttctttcctgtttttgagacacagtctggctctgtcgcctaagctggagtgcagtggtgggatctcggctcactgcaaactctgcctcccgggttcacgccattctcctgcctcagccacccaagtagctgggactacaagtgctgccaccacatccagctaattttttgtatttttagtagagacagggtttcactgtgttagccaggatggtctcaatctcctgatctcgtgatctccgcgcctcggcctcccaaagtgctgggattacaggtgtgagccaccgtgcccagcctaatttttgcatttttagtagagaggaggtttcaccatgttggccagggtggtctcaatctcctgaccttgtaatccgcctgcctcagcctcccaaagtgctgggattacaggcgtgagccactgcaactgactttttttttttttttttttttttttttgagacagagactcactctgtcacccaggctggagtgcagtggcatgattttggctcactgcaacctccacctcctgagttcaaacaattatcctgcctcatccttcggagtacctgggattacaggtgcgtgccaccgtgcccggctcatttttgtattcttagtagagacggcatttcaccatgttggccaggctggtctcaaactcctggcctcaactgatccactctcattggccttccaaggtgctgggattataggcgtgagccaccacaactggctcagtaaatacattttttattatcaaaaaagagtagtgtatggttggcgtattctgtgtagaatgtattttattgatgtctcctatttttataatttctgagttaagtactttttaattaatgctttttagttttgggcagattcagttgactaaagcacctcatttcccagatacatgaaataaaatatttggcttcttttccaatttcacactgatgttattttgtgaaaatcagtgctttaagataaatcgttatacgttaagataaacatgagaaacttgatctaatatttaatatttattcagttctacactttattaacttctacaccagcagatttagacattatgtaaccatctcaagaagtttcacttggatgtaatgcttcacgcttgtaatcccagcactttaggaggctgaggtgggaggactgcttaaggcaaggagtctgagaccagcctgggcaatacagcaagatcccatctctattttaaagaaaagtttcactttgggaggccaaggcgggtggatcacaaggtcaggagatcgagaccatcctggctaacatagtaaaaccccatctctactaaaaatataaaaaattagctgggcgtggcggtgggcgcctgtagtcccagctactcgggaggctgaggcagaagaatggcgtgaacccgggaggcagagcttgcagtgagctgagattgcgccactgcactccagcctgggcgacagagtgacactccatctcaaaaaaaaaaaaaaaaaaagtttcggcaaattccatctaagaattccaccagagttctgttgtctccaatgtcatcttccacagatttcaagttgtgaagccctgaactgttaatttatcttgagaatgtatatttaagcttaatttaagactatatacctaaaaattgagcatataatttctataatttgtttatgtaaatttctgtaagtcataagtatgtggtttccaagtgtataatttatctgaatgtaataggcattaatatattttacattactgggaccatagtacagaaatttctaaatggtttgtaaaataacttgttatttgtgttgttgtaaaagcagttaatacaatggaaaaactcgtaataagaagatacagtttaacatcaaaaagtttacccaaggtaattatgagtactacctggcaaaacttcacggaagctgtggtatcacttttatgatggaagaatggtgtttgcattttgtgtaaaagtacttgcggctgggcgtggtggctcatgtcccagtgctttgggaggcgaaggcaggtggatcatctgagcccaggagtttgagaccagcctaggcaacgtggcaagagcctgtctctccaaaacctacaaaatttagccaagcttggtggtgtgagcctgtagtcccagctacttgggagactcacgctggaggatctctcgagcccaggaggcagaagatgaataaataaatggaagcaactgaatgggatgaggtctctcttgaaggagagagcaaaagagatttaaatagtaacaattataataaggctgggcgcggtggctcacgcttgtaatcccagaactttgggaggccaaggcaggcggatcggttgaggtcaggagttcaagaccagcatggccaacacggtgaaaccctgtctctattaaaaatacaaaattagccggacatggtagtgcgtgcctgtggtctcggctactcaggtggctgagacaggagaatcgcttgaacctggtaggcacaggttgtagtgagccgataaatataaaaagtattagagtactaacagaggaaagtttccactgatcaccttttagctttaaataatgcagaagcatttgcccagtttacttgtaattaaaaatcatgcatcattcacaatttatatcttttttgtttgtacaaaaatgaacacaagttattctcttttatctgtattgtgattggtttggtgagagggaattaggccacttgagagtttgtgtgtgtttacaattttctggccaggcacggtggctcatgcctgtaatcccagcactttgggaggccaaggcgggcggatcacttgagctcaggagttcgagaccaaattgggcaacatggtgaaaccctatctctacgaaaaatacaaaaattagctgagtgccgtggcttgcgcctgtcctcccagctacttggggggctgaggcagtaggatcgctcaagcccaggaggtggaggttgcagtgagccaagatcacgtcactgcactccaggaagggcaacagagcaagactccttctaaaaaaaaaaaaaaaaaaagaaagaaagaaaagaaaattaactttggtatttcaggttgtatttaaatggagacttaacatgaactatgttcataacacttgaccaaattaagtgtagatcgtctctttaataaagagatcatctggaactgcaatttctaactcatacatcattgctacaaaccttatttgtttactatttctcttccaaggaccatcagtcatcctttaaaattcatttcaagctctgaaaagatattttttgttacatgggcaatttacttttagtacagtaaaatgttatgtgaatttctacagtatgtttgccaaaatgaattatatctagaatacgcttaacaatatattctggaggcagctttcatttgaaattaggttcaccttctgagagtatgaaaaagttaatgggtttttgtgcctgaagattttgatgttgcatttggctacatttaatccactttcacccataagttttaacatctaaaaaaattaaatcactgctaatgcaattaaaatgcattatgaaatgcatttctgtccaggctggagtgcagtggcacaatctcggctcactgcaagctccgcctccctggttcacaccattctcctgcctcagcctccctagtagctgggactacatgtgcccgccaccacgcccggctaattttttttttttttttttttaatgaggcggagtctcgctccgttgaccaggctggagtgcaatggcatgatcctggctcactgcaacctctgcttcctgggttcaagtgattcgcctgccttgctgggatgacagacgtgcaccacaatgtccggctaattttgtatttttagtagagacatggcttcaccatactggccaggctggtcttgaacttctgacctcaggtgatcccaccttggcctcccaaagtgctgggattacaggcatgagccactgtgcccagcttaagatctctgttttaatgttaatgctggtcagttgtgtctggattccagagggaggaaggtagaatgaggcatgttgacacctccccttcccatcatggcctaagctggtcttttcagtttactttggaatgtccttgctcaacaggaagggtccattcagtcggattgggtggcttagaattttatttttggtttacatctcaactatcacagcagccgggcgcggtggcttcacagctgtaatcccagcacattgggaggctgaggcaggggtatcacctgaggtctggagttctagaccagcctgaccaacatggagaaaccccccgtctctactaaaaatacaaaattacccgggcgtggtggtacatgcctgtaatcccagctactcgggaggctgaggcaggagaatcgcttgaacctgggaggcggaggttgtggtgagctgagatcgtgccactgcactccagcctgggcaacaagagcgaaactctgtctcaaataaataaataaataaataaataaacaaactatcacagcataaagtaggaatatttcgttactgtctagttaaactggttaatgcagaaaggaagtctggaaattccagttttaaagtaaaattttggacattgtaggattgattatttggcatagttgtgatgtttgttcctgcgttatggttttgttggcagggcagcctttaaggacctgtatattttcttctagactctatatattccctgtgagtattagttgtatggtcaaactggcaaattttaccataggtataaataatagagaatgtggaagaatagtgaatagtgtcagagatagttaaaagtccatacaatagtagagaaggtaataagtaatagtggcttggactaaatatttgttgaataaatgttttaaaaaacaggctacctacaatttgtgttgaagatatgaatgaatgaagtttccacacctttatgtggagacctgataagtaagcaacaataaggaagggtccccaggttggggagagccccaagttgagaacaataatgaacaatgattgtatgaacaattgttagaaacagctaatcacaaacaacctgcgggcacaatgacctcattccacacgtagcacccttcagcaggaccctataaaactttcctccagcccttgcctctttgcaggtagccccttctctgctgagctgcccactgcaacatattttcacaatttctctaataaatctgcccttctttacctacaactatcttggtaaatggctttaccacctgcaaaactgaccctaggttgttgctacccgatatggtttggctgcgtccccacccaaatttcatcttgaattgtagttcccataatccccatgtgtcgtgggagggacccggtaggaggtaatcgaatcatgggggcaggtttttcccatactgttctcgtgatagtgaatacatctcactaaatctgatggttttataaagggcagtttccctgcacgtgctctcttgcctgctgccatggaagacatacctttttgctccttgccttccaccatgattctgaggcctctccagccttgtggaactgtgagtacattaaacctctttttctttataaattacccagtttccagtatttcttcatagcagtatgaaaagtaactaatacactacccgagacatcttaggagatttgtaatagctgtaatgccaggtccaccatatttttagcataaagcaaatgtttacgcgtgatatgactgcacgggctttctttcagctggagccatagcaactcaagtagtaaccctatcttagtctgattaaaagtaaatattagtctgggcatggtgggacatgcctgtaatcccagtactttgggaggctgagacagaaggattgcttgagcccaggagtttgagaccagcctgggcaacatggaaaaacaccatctctacaaaaaatacaaaaattagctgagcgtggtggcacacacctgtagtcccagcaccttgggagggtgaggcaggaggatctcttgaacccgggaggtggaagccgcagtgggcaatgatcatgtcagaggtgtgtgaaccagagcaactccatcttaaataggagccaggaaaaatgaggctgaaactactgggctgcattccctgatggttaaggcattctaagtcacaggatgacatagaaggtcagcacaaaataccagtcataaagaccttgctgataaaacaggttgcagtgaaggagctggccaaaacccaccaaaaccaaaatagagacaagactgacctcccatcatcctccctgctacactcctaccagcaccatgacagtttacaaatgccacggcaacatcaagaagttaccctatatggtctaaaaagaggaggcatgaaaaatccactccttgtttagcatatcatcaagaaataaccataaaaatgggcaaccagcagccctcacggctgctccgtctatggggtagccattcttttattcctttactttctctctttttttttgagatggagtctccctctgtcacccaggctggagtgcagtggcgcgatctcggcttactgcaagcttcgcctcccgggttcatcccattctcctgcctcagcctccagagtaggtgggactacaggcaccggccaccacacttggctaatttttttgtatttttagtagagatgaggtttcaccgtgttaaccaggatggtcttgatctcctgacctcgtgatccacctgtctcggcctcccaaagtgctgcgattacaggagtgagccacggtgcccctcctcctttactttcttaataaacttgctttcacttcacactgtggcatcaccctgaattctttcttgcacaagatccaagaaccctctcttggggtctagattgggacccctttcctgtaactatcatgctactgcactccagcctgggcaacagagcaaggccctgtctcaaaaaaaaaaaaaaaaaaggaacatgacttaatacattcattttggaggataagtctctcaaaataggcctttcactgggggaaaatggtaaaaatactccctggtaattcaagaattggagactcctgagatgctgctcatattagctgagcacttatcaatacttcacttttttccatatatactcaaggaacaagtgctatttaaagtgtttcactccactgggctaggtgcaagactataaagaggtgtgaggatcaacacttttatgaaaaccagtgtcattctggatatagtttcagatgctagtgcaaaggaagctcttggtatacggaaaaagtattcaacaataaattaggcatggttgcttccattttctgcctcacatactttttttttcgtggttaaagtgatataatgtctatgatattttagattggcagttgcaaactagtggtcctcagcgtgctttttatgacacctacaaggtctgaagactttgatttcatattaaaaatctgggtttcaggctgggtgtggtgttgcatgcctgtaatcccagcactttgggaggctgaggcaggagaatcgcttgaaccagggaggtggaggttgcagtgagccaagatcgcgccactgcactcaagcttaggcaatagagcaagactccatctcaaaaaatgaataaataaataaataaaatctgggtttcaggccaggtgtggtggtgcactcctgcaatcccagcactttgggaggctgagatgggcagacagcttgacctcaggaattccagactagcctgggcaacatggcgaaaccccatgtctacaaataatacaaaaaaattagctgggtgtagtggagtgtgcctgtaatcccagcaacgtgggaggctgaagtgagaggattgcttgagcctgggaggttgatgttacagtgagctgagatcgccctcctacactccaacctgggcaacagagccagaccttgtcttaaaaaaaaaaaaaaaaaaaaaaattctgggtttctggcatctcaaaaaaaaaaaaaaaaaaaaaaaaaggaaaggtcagggcacatggctgctacagtcctctattaagcaatgtgccacagcagggtccctgacccctgggccatggacatgtactggtctgtggcctgttaggaactgggccacagagcaggaggtgaatggtgggtaacaattgaagcttcgtctgtatttctggctgctccccattgcttgcattgctgcctgagctctgcctcctgtcagatcagcagcatcattagattcttacaggagcatgaaccctgttgtgaattgcacacacgagggatccaggttgcatattccttatgagaatctaattcctgatgatttgtggtggaacagtttcatcccaagaccattaccatcctgcgccccatcccttgccgcctgtggaaaaattgtcttccacaaagccggtccctggtgccaaaaatgttggggactgctgtgctttagaatctgccatgaatctgcagcctctattatatagctccctatagactttgcttcctaccgtcttacgttctgccttataggcatttgactttgcaacccttgtttttgttagtatgctacgctggtgacattgaccaaattgaccacacattaattataagcttagttggtgatgacctcaacggaataacgtgacataagtattgtgacaatacttcttgcatgtatctgcaggtggaattgtaaacctggtggtccgagatggtctaattccatcttcctatgtatctccttatattaatagtggtaacatttgtggtggtgattcagcatttcaatgcctcttctcatggcaacaacaaacgttttccttctgaatcaacattaacctagatgttactgcggatcaaaattagactctacattttcaaccacagaaataccgagcagtaaaaatttttcttaatattgattgcctacataggttgtgtaattagcatatgtttacagttctatgatttctgcgtggctgctacagagctggagggggtaaagcaacagtattttctcagttgtccgagcagcattacattataataaataggtaatattaaactgggctgatgagagttgcaaaagactactttaatgttcatatggaaccaaaaaagagcccacattgccaagacaatcctaagcccaatgaacaaagctggaggcatcatgctacctgacttcaaactatactacaaggctacagtaaccaaaacagcctggtactgctaccgaaacagacatatagaccaatggaacagaacagagccctcagaaataataccacacatctacaaccatctgatctttgacaaacctgacaaaaacaagaaatgcagaaaggattccctacttaataaatagtgctgggaaaactggctagccctatgtagaaagctgaaactggatcccttccttacaccttatacaaaaattaattcaagatggattaaagacttaaatgttagacctaaagccataaaaaccctagaagaaaacctaggcaataccattcaggacatagggatgggcaaggacttcatgtctaaaacaccaaaagcaatggcaacagaagccaaaactgacaaatgggatctaattaaactaaagagcttctgcacagcaaaagaaactaggatcagtgtgaacaggcaacctagagaatgggagaaaatttttgccatctacttatctgacaaaaggctaatatccagaatctacaaagaacaccaacaaatttacaagaaaaaaaaacaaaccccatcaaaaagtgggcaaagcatatgaacagacacttctcaaaagaagacatttatgcagccaacagacacatgaaaaaatgctcatcatcactggccatcagagaaatgcaaatcaaaaccgcaatgagatatcatctcacaccagttagaatggcgatcattaaaaagtcaggaaacaacaggtgctggagaggatgtggagaaataggaacacttttacactgttggtaggactgtaaactggttcaaccattgtggaagacagtgtggcgattcctcagggatctagaactagaaataccatttgacccagccatcccattactggatacatacccaaaggattataaatcatgctgctataaagacacatgcacacatatgtttatcgcggcaatattcacgatagtgaagacttggaaccaacacaaatgtccatcaatgatagactggattaagaaaatgtggcacagatacaccatggagtactatgcagccataaaaaaggatgagttcatgtcctttgtagagacatggatgaagctggaaacgatcactctcagcaaactatcacaaggacaaaaaaccaaacaccgcatgttctcactcacagatgcgaattgaacaatgagaacacttggacacaggaaggggaacatcacacactggggcctcttgtgtggtgggggagggggaagggatagcagtaggagatacacctaatgtaaatgacgagttaatgggtgcagtacaccaacatggcacatgtatacatatgtaacaaacctgcacattgtgtacatgtaccctataacttaaagtataattttaaaaaataagtaaataaataaataaaaaaagaaacaattgctggctttgcaattctctttcctccaaaatcgccaaggcctcaatttactcattgctgaaaaaggacgactctgtatatttttaaatgaagagtgttgtttttacctaaatcaatctggcctggtatatgacaacataaaaaaactcaaggatagagtccaaaaacttgccaaccaagcaaataattatgctgaacccccttgggcactctcttaattggatgtcctgggtcctcccaattcttagtcctttaatacctgtttttctccttctcttattcggactgtgtgtcttctgtttagtttctcaattcatacaaaaccgtattcaggccatcaccaataattctatatgacaaatgctccttctaacaaccccacagtatcagcccttaccccaaaatctttcttcagttgaatctctcccactgtaggttcccaggccgcccctaatcccgctcgaagcagccctgagaaacatcgcccattatctctccatatcacccccacaaattttcgccaccccaacactttaccactattttgttttatttttcttattaacataagaagacaggaatgtcaggcctctgagtccaagctaagccatcatatcccagtgacctgcacgtatacatccagatggcctgaagcaactgaagatccacagaagtgaaaacagccttaactgaagacattccaccattgtcatttgtttctgccccaccctaactgatcaatgtactttgtaatctgccccactcttaagaaggttctttatcatctcccccacccttaagaagtttctttgtaattctcctcacccttgacaatgtactttatgagatccacctcctgcccccaaaacactgctcttaactccaccgcctatccccaaacctataagaaccagtgataatcacaccaccctttgctgactccttttttggactcagcccgcctgcacccaggtgaaataaacagccatgttgctcacacaaagcatgtttggtggtctcttcacacagacacgtgagacaggagttcgagaccagcctggccaatctggtgaaactctatgtctctactaaaaatacaaaaattagctgggcatggtggcgggcacctgtaatcccagctactcgggaagctgaggcacaaaaattgcttgaacccaggaggcagagtttgcagtgagccaagatcacactgtcaggcctctgagcccaagccaagccattgcatcccctgtgacttgcacgtatacatccagatggcctgaagtaactgaagatccacacaagaagtaaaaatagccttaactgatgacattccaccattgtgatttgtttctgccccaccctaactgttcaatgtactttgtaatctcccccacccttaagaaggtactttgtaatctccccaacccttaagaaggttctttgtaattctccccacccttgagaatgtactttgtgagatccacccctgcctgcaaacatggctcttcaccccctatcccaaaacctgtaagaactaatgataatccaccaccctttgctgactctcttttcggactcagcccgcctgcacccaggtgaaataaacagccatgttgctcacacaaagcctgtttagtggtctcttcacacggacgcgcatgaaacacacgaccgcacttcaggctgggcgacagagctagattccatctcaaaaaaaataaaacaaaaaggagtcacctcccccgagaggcctctggaccaccccatctgagcaggccactcttccttctctatcttaccatcttgtttctgtcccagtagttagggctacctccagtaatcctatttgtccctttactgtttagtgcgtctcgcttgactagaagctccatgaaagcaagagaccctacctgcctccttcgccactagacccccagggcctggtatgtggtgatcgctcagggcccattttcttcctttcctcctcctccaagggtggggaaagagcatcagaaggtctaggtggccccaggcccaaacaatgctcctttaaaaggaaaccagattgttacaaaggtcagaggctgaaaagttatttccgccttttatccctctaaattcttcacttcctgaaaaaacaaacaaacaaaaaagccactgagggcccttggactaaatccaggcctcagttgctgggcagaggtcagtcttgtccagacatgggaaaaaaataattcgagtcagacaggtgggtcaccagagaacgaatccagcctgcaaatggcctgtgcaatcttcagctctgtccagacctgcctccctttggggatgcctttaaaggtgatgaatgatctggatgaatgggcttagaagataagagggaaaaacaaatatcacaggtcaaatcgttatttgtcttcaagtttaacaccgtctactggactaaaagatgtccaaagaatagttgttcaactatgtaaattcctttttttctttttttttttttttgagacagagtctcgctctgttgcccaggctggagtgcaatggtatgatcttggctcactgcaagcaacctctgattttagtattgttagtacagacagggtttcaccatgttgaccaggctggtctcgaactcctgacctcaggtgatccacctgcctcggcatcccagagtgctgggattacaggcgtgagccaccgtgcccggccaactacataaattcctaacaacgtatctccagaaagtataggcacaacagcacatgcagtcattcctgtaattaagtgctccgggaggccaaggcaagaagatcccttgagcccaggagtttgagaccagcctggacaacatagcaagactgtgtctctacaaaatatacaaaaattgggctggggatggtggctcacgcctgtaggcccagcactttgggagaccaaggcaggaagatcgactgaactcaggagctcgggaccagcctggacaacataacgagacccagtctctactgaaactcaagaaaattagccagacgtggttgcatgtgcctgtagtcccagcactttgggaggccaaggtgggtggatcacctgaggtcaggaggtcgagaccagcctggccaacatggtgaagtctcgtccctactaaaaatacaaaaattagccaggcacggtggcacacacctgtagtcccagctacttgggaggctgaggcaggagaatggattgaacccaggaggcagaggttgcagtgagccgagatggcaccattgcactccagcctgggcaacagaacaagactccatcaaaaaaaaaaaaaaaaaaaaaaaaaaagaaagaaagaaagaagaaaagaaaattagccaggtgtggttgcatgcacctgtagtcccagcactttgggaggccaaggcaggaggatcaatcaaggctaggagattgagactgcagaaggaaaccctgtctctaaaaacaaggtccagctaaaatcagggtccagctccaccacaagcgcagctccaggggctgttgagttttgcctctaccattccaagtagtctctgctccagaccaagtcccaccatctggcagtcatgtcagtctaaccacagtcatatcagggcgcttccagtcattgagtgccccttgaggaggctggaggagaggccaatgacatttgcacttgagactccagagtctagatttataaccactatgttatggctgccagtgtggctgcaaggacacttctttcattcattcatttacaatagatgtagcatctgctgtgtgccagatgccattctaggttatagggaaacaaggcagagcccctgttttccaaggcatccacattctaggaaagactgctaccagcctggcgtggtggctcatgcctgtaatcccagtactttttgggaggccgaggtgggcggatcacttgatgtcaggagttcaagaccagccaacatagtgaaaccccgtttctactaaaagtacaaaaatcagctgggcatggtggcacgtgcctgtagtcccagctactcaggaagctaaggcaggagaattgcttgaacctgggaggcagaggttctggtgagccgagatcatgctactgcactccagcctgggcaacagagtgagactccataaaaaaaaaataataataataaaataaagactgctactaaacaataaaataaccaaaccagatagatgacttcaggtggtggtaagagctttgaaagaataagcaaggtaactaactggtcagaggaagggagatgggtgcattccctcagatagaccgccccagaggtctgcctctctgacatgacatttgagcagagacccaacaggaaaaggaagagactgctctatggccaggcacggtggctcacacctgtaatcccagcactttgggaggcccaggcgggcggatcacgaggtcaggaaatcgagcccatcctggctaagacggtgaaaccctgtctctactaaaaatacaaaaaaattagccgggcgtggtggcggatgcctgtagtcccagctactcggaaggctgaggcaggagaatggcatgaacctgggagatggagcttgcagtgagccgagatcgcgccactgcacttcagcctgggcgacagagtgagactccatctcaaaggaaaaaaaaaaaaagaaccaagaggtgtccaggcgaagagaacagcagatgcaaaggccctgtggcagaaacaatcttggtatgctggaggaataggaaggcagccagtgcagctggagcaggataggttaagggaggatcaaggtgatgagggcctggaaagaggggctggggtcgaatcaccagatcctgttggttgcaatggaagagcctggagtttattctcagagcagtgagaagccactggaaagttgtttttttgtttttctgtttttgagacagagtctagctctgtcacccaggcagactgcagtggtgcaatcttggctcactgtaacctctgcctcccaggttcaagcgattctcctgcctcaggctccccagtagctgggattacaggcacatgccaccacacccatctaatttttctttttcttttttttttttttttttgagacagagtctctgtcacccaggctggagtgcagtggcgcaatctcagctcactgcaacctccacctccctggttcaagcgattctcctgcctcagcctcccgagtagctgggactacaggtgcatgccaccatacctgggttaattttttgtgtttttagtagagacaagatttcaccacgttagccaggatggtctcgatttcctgacctcgtgatctgcccaccatggcctcccaaagtgctgggattacaggcgtgagccaccgtgcctggccagccaccggaaagttttatgtaagcaggggagtgatctgttttatcatttagaaggatacacacctcttcttctttttttagagacagggtctagttctgtcacccaggctggagcccagtggcacaatcatagcttactgtaacctcaaactcctgggctcaagtgatcctcctgcctcagcatcccaaagtgctggattacaggcatgagtcaccatgcctggtcacacttctcattctttaaaccagacctcatttgtccatctcccccatcccccgccccaccccacggactgtcctataatgcccatacaacaggtcactgtttagaaagtgctacaaagttacaaacacagtcccttctgagcctcccaccaatgttggtgggtacaaggtcaaaaaaaaaaaatctcatctatctaaggggcataggagactttttagttagagggcccaattatagtcctcctgaaaagatgccaaaagtccccttcaacacttagcaaagattcaagaaagatgaatctcacattctttgtatgggaaatgaggaacttgacatcttcaatataatggattccactaaaataagatgacgatcaataggaaccaactaaaaaaatacttgactagctgttattgaaaggctgaaattcagctgacataagcagtattaatattgagctagaaaataattcgcattgaattcagcccaacttttgttttctgatttgggtctcttctaaattttttttttcttctggacattgggaacaatccaatttgaaggcctcaatgcccaaatctacactcttgttttattctatatccttggtttcttttttttttttttgagatggagtctcattctgtcgcccaggctggagtgcagtggcgtgatcttggctcaatgcaagatccgcctcccgggttcatgccattctcctgctgcagcctcccgagtaattgggactacagatgcccgcccccacgcccggctaatttttttgtatttttagtagagacggggtttctccgtgttatccaggatggtctcgatctcctgacctcgtgatccacctgcctcagcatctcaaagtgctgggattacaggcgttagccaccgtgcccggcccacacctaggtgatttttaaagttcttctagtagagacagggtctcactatgtcgggtcgccgtgtttgatgtcagttttccctgccagaatctacaatctccttgatcaccattatatcccaacgtagagctcagtacctggtacaaagcacatttgatcaatacttgctgaataaagaaataaaaatgaagaggcactccagcctgggcaacagagtgagatggtctcaaaaaaacaaaaacaaaaacaaaaaacgactggaaaggagatgagggtacttgtgaagccatattatatgacacgctctgtgctaggacttttatataccttgtctcatctcttcatctcatataatccttacaaggatctcaaaagtggggaaatccccatataactgaagacgaaggcagttcagaagttcactgatttgccctaaggttcctcaatttgcaaacgtcaggccaatgatccaaccccaggtatgtttggcagtgaaggaccagttgagtcacagctgcaagtaaccaccctgcagtggtccctatcttggccgttagcttacattgacatttaacactcaaatttactcagtaacaccagctatcatgttttccactaaaactccacagcattctggcaacttttctattttagagcaataaagtaaattgttagcatccctttgacatataaatatttctacaaatagtaattctctagccattcatttggagtatttaaaactcaacattcatagcacattttatgtgacaaagaacttctgttcagaacacaaaaataagtcgtacatcttcattaaaaacgggtgaagaatttgaacaaacatttgcaaactaaaatacaaatgaaatacactcaacatcattagtcatcaagaaaataaaattatgagataatcactaataatcactacatatgcaccacagtgattaaaatttttttaagttaagccacgtgacccaacaaggtgcattcactcaagagaaacgcaaatatatgtccactcaaagacttgcacatgaatgttgagagcaggtttatactgaatagcgcaatgtgaaaaaaccccaaaatctagcaaaggatgaagggagaaataaactgtggtatatacatacaatagaacactactcaataataaaaaggattatattcctgatacatgcaatatgggtgaaccgtaaaaatatcatgctgagcaagagaagccaaacacaagagaacatgttgttatgatttcacgtacatgaaactttagtaaagacaagtctaatccatagtgacagaaagcaaatcagtaactgctgacaggggcaaatgaggagatgatctcaagggaaccttctggggtaagatgctgttctgtatctcgatcgtattggtggtcacacaagtgaagacatgttagaactcatcaaaccatacacttagaatgtgtaatataaacctcaataaagcaaaattaaaaaaaaaaaaccacctttaattttctcttacaaaaaaaaaaaaaaggaaaaccacttaactttaattttctccaacaactgattctggtacacagtataccttaatgcctgcatccacggcctcacgtcatgctgtttacatgaacgtaaagcttcgccgaagagtggaataagacagtcctgccagagaaaaaccaaaattactcaacgtaaaacaggctgttgatatgtttgcagatatatagcaagtcttaagtccaagactgcaatatagtttggctacttcagattgattgcagtagttttatctattacactatacccttccatcatttatcttctactcacaagaggcaagcacacagtaagagaaagccttttgttttgaagggaaatcttcttcagaatattaagtctaatttatcaatatacttaataaagcacattacaaaaaaaatgtcacagcacatttactataaagcagactgcagaaaaacattacaactaatgctttattatgaagttctcgaagatcaccattcattcagaagcccccatctctggtcgaactttaccccatttaggatgaagaggagagatctttgtttgcagcaaatctaaaatttacgtaatccgcctaaaggaactgtctttacatacaccacctcccaccccaaaaatagaagaaaaaactgagcaatttgccatccttgcgattatctcaggttcttccatctgccccatgtacttcccaaatgaaagactgcctgaaaacggcatgttagatttctggatttaccagcttgcccaactacaaatcctattccaaaaaactcaaaaaataaggtctttgttctacagtaatgaccattaatagtcataagagtgtgcttgtaaaaatatacagacctctgttgaaagtctgttagaaactgtggtctccaaagcaaacgagcaatacagctacaaggtacttagaactggcaaagactgtgaaactgttaaagtagaaagtctcagaggtccaatagtgatgcgggatgtttgcttcaagtactttaccacatttctgaaacaaaatatttactgtcaattaataaaaattacaattcataaccactcaaagaataaagcaattgataagatgctatcaaactgacatccaaagttagggggcagtaagaggagcagcctgctctataataaaatgatatcagcaagtcaagacatttgcttttggggatttttacattttatttcatttcaacctcagtttttgttggcaagcagcattcatatatcatatgacttctacaactaaaatgaagctattagcactagtatttagtaatctagtaactctccttccagccctcttcaccccatgtatgtttatcacatgatatacacaatgtacatttacctccgtaagagtaaacttactcagttatagactgccacttctgatcttgttctatcgggtttaaagcagttgccaaacaaacagaacttcttaacaatggaacttcaatggatttctgaggttcccttggatctggacttcacatgttacgaagcagttttttcatgtctacagaagttaaatgaaatgtcattaagttaatgtgcttttattataaattttgatttatgtttggcattattaagaactaatcaccaatgaacagctcctttaatatttcaggcagttaaacactataagcattactgagagctatataaaaatcatacttcatacaaaattactgtacctcagacccctaaaaagcagttgccttcaaaggctcaaaaatcactaagtcgaggtcaggtgtggtggctcacgcctgtaatcccagcactttgggaggccaaggtgggtggatcacgaagtcaggagttcaagaccagcctggccacgatgatgaaaccccgtctctactaaaaatacaaaaaattagctgggcacggtggcagacacctgtaatcccagctactcagggggccgaggcaggagaatcacttgaactcagagggcggaggttgcagtgagccgaaatcgcgccactgcactccagcctgggcaacagagtgagactctgtctcaacaaaaaagaaaatcggtaagtcaatctactatttaaggggacaaatctagacctgcattagcaagtcttgctcaatccagaatactcattaaactttttaataacatcttatcaagtgttccatttgtgataaagaacttaatgagccacatcaagatgaaaatcaagaaaaatatttagctgaaacactactttgtcctttatcaaacaaaatggctagataaatctcaaagtattaaggtggtcattttttttatttgacttaattttaagtgcttttcatttcccaaatcaaacataaatagggcagccctaaatttgttgcttcacatgggattctgcccccacaaaaatgtaaaataacttccagattttccagtaaaatatactaagccaaacattttgagcaacttgtccactaaaataactttaaaactattttctcaaatacctacctattttttcttttgaccctccagcaagtagattgatattttctcctggtaacaattctaattgctcggtacatttgacaaattttccagactcaaagctgcttaatgatctgtaattaaaatattgcttagcttgtattcctatgcagcctgtggaaccattaaaaaaaacaaacaaacaaaaacagaacaaatcctaggaagacagcaaagtacacagcatttttctgacaaaattccttccacgaggatgccattattttggtttttatgttgaagatgtgactaccacttaattagtactcaaattggagtggcaaaccagaaagtcacagctacagactttcagtggagctgactcgcccctgtgtctccttcctgttttcatgtgttgcagcctgttctcttcagagcctgacacactgacagtagacctctgcaggacaactttgacacccagttctctccaagctgccagtgagctccctgtgcagcctcactcctcacctacagcatgagcccttgcagctctcccagcatcacaatcttgtatctcagtcctggcttctttcactgctggcatccctctgtctctccctttttcacctacttttcttttttcaaagaattcttctctttcatctgcttatatgaaaaataatgacacctctgaaattctttcctgtagttctgcagcatcaatgccaggaagacaggcctcatcctcccagcttctatgctgctcctttcagatcccttaccctgtccccattttcatgacacgggctctccagccaggaagaagacactgtttctcactctctcttttccatctttgcctgtccctctcgctgtgtaacttcccttataactcagcctgaggccagtgctagaaaggcacatcacctgacttattctgtgcctgattctacctagatcagtgcaaccactggcttctcagggggacccttgagtactgggcactgatgaactgctgccaacacagtcatcatttctgccattaaaaggtcctaagtcctctccagtggcaggttccccaagtccccactatgctctataatgccctatgctttcagctaatgactcagtcctcagaaaaaacaaacaaataaacaaaaaaacacaggctttaatttcctctacccctacccccaatccaccatacactgccgaaattctgtctataccaactttgactgctttccttgaggcagagaaaaggtgagggccagttaatctatcaatgttctttctcctgtttcttcaacctctgctttctagtggctccttccccttggccaaaagaacataatctctccaacatttaaaataaacatctcatatttccctccagcaacagcttcctatcctcgacttcaagaaaaactcactgaccaaataacttacctcaagcttttcattttcaaatgtctctaccactcaatactattcaatctagcttcttctgtctctctacaaaactctttttccttataatccctagagcatctgacaaggctgactactcccatctggatgtcctatatctagggcacttcccttctcaatgtccctgttatttttttgaatggcttcctcttctatcctttcacaaaaatgctaaactaggattctgacccaggccttccttcctcttcactcactattctccagaggcttctctctggtttggttgcttacaaaggctctagagtatagagactgaaaaggaaagagggccttttctgtgtactaatcatctgcaaatctctcaagcttagactgtctccttagttcaaaatccaattcttaacagcttacccaacaatctcatctgcacatttcattagaaatcttaaaacatggcttgttctctgtgtgctcctactccagttaatagcattgtttctcttccctctaccattgcccccataaattaatggtctccatgcttccatacttgccccgcacctccagtctcttcaccacagcagaatgaaccaagtcagatcacaacacatctctgttcaaatcccacctgaaattttcagtcttactagaataacagccaaagttcttctcagttcccagctacttctctgcccttatatcctactgtttaaggcgctcctaaacacacaggcctcccagctatttccagaacactccaagcccatcattctcacatcaggtctaggcccaaagggcatcctgatgggcatgtcttgaccttgtgtcttccctccaaagaaggtcagctttacctaactgctttccttatggcacagaaaaggtgagtgaggtccaattagtccttctatcaataatctttatctaatctttgctttaaaaggttggaatttgtgtctgttttatgtgctgcctgggtcacagcacatgctcagtgaagcaattacacattaacccatttagcagtagaagtatcagacaaagtctaatgacctttatcttcccagccaagtgtctgcaacagagtgctcagttttgaattacagaattaataaaagcacagaggaatgagaagaaagtttaatttacagatgttcacaaactctgtcctcattagaataaatgtttttgatatattcagacctcatttagaaacaaagccatcaaatgtgattctttctaaagcagtacaaatttttctttatattcactctggcataatcttcaaactgtattaaggttttagaacaacaggttctgaaaattaataccaaatgactatctcagcagtgttttcccattatacaaataccttccctcatctctgatgtcagtttcctgttgtcattttcataatggcagtaagttagaaatataaccattttgtattactacatatgaccaattttaatatttttttgccataggaaaaacatcgtagttattggaaatttgttttataactggaaacagaaagccttactttatatagttgaagtcagctttcaggttgaaggaagtgctactggtactctttttcaagtcatggatagcgttctgccattcctgcacagcagcccaatcggcaattgagatgtagcactcacatgctttatttcctaaataatttataacctcaggggaagagtcagtcggtttggacagcacagtttttctggattcacctgaaagtattttataaagtaagaagagagagattcagatcaattagaaatatttcaaagagcacagaaacctaaaaacatgataagatcatcagtacgaaatatattactataacttttgctttatttaaaaatactgaacgctcaccattcagacaatgtttcgggctggcactgttacacccagcattggctaaggtgagcaccgatttgtcaaagctggagatgcagcaatgaacacctatcatggcacacaggtgttcctggtactccacagaggccttttcaaacctgaaaagcaaattgaagcagtcttatttctttatttatctacttacttactttttttttttttttgagatgaagttttgctcttcttgcccaggctggagtgcaatggcactgtctcagctcaatgcaacctctgcctcctgggtacaagcgattctcctgcctcagcctcctgagtagctgggattacaggcgctcgccaccatgcccggctaattttcttgtatttttagtagagacggggtttcaccatgttggccaggctggtcttgaactcctgacctcaggtgatccgcctgcctcggcctcccgaagtgctgggattacaggcatgagccaccgcgcctggcctttacttacttacttacttgttttttgagacagtcttactgtcacccaggctggagggcagtggcatgatcatggctcgctgcagccttgccctcccaggctcatgcaatcctccaacctcagcctcccaagtagctgggactacaggcgcccaccaccacacctggctaaaacaaggttttgctctgttggccagggtggtctcaaactcctggactcaagcgatccgctcacctcagtctccccaagtactgggatttcaggcgtgagccaccgcgcccagccccaaaggaggctgttattttaaacacacatatctcatttcccccctcccacaaaaaatggtgcaagaataaactgagctaaaacagtgagttgactatggtggggggaggtttgatgtcttcctcacaactatgaaactaaatttaaaagtggttaaatgttttttaaaaaatgtaagagtataaaagaactagtggaaaatattgataagtaactgatgtcagtgtgtggaaaggctttgtagaaggataaaatgcaagaaaagatgcacaagtaacagcatctagatgcataatgctgaaatacaacactaaacattaaaaacaaattataatcaagaaattggatagcatcaacaatcttagtatttaatgaaatttcacagattaacacaggaaaaattgagaggccatgaagacatgatccatgttttaaaaaatcacaaatggtcactatatggggcaacttctactattagtcattaatacatatagaaatgtaaagtacaataactattttcgctgatggtggtggcagcattcttgtttctcagtgactctcagtatccacaaaggtgaagggaagggggtactctattattaagggtatacattgcagccatcttttctgtagagtaacttagcaatagaatatatcataagacttatggtttggcagcctttcttctagtaaatcagtttatgagaatggattccaagaaagtaatcagaaatataagcaaagatattaagtgctatggtacatttagtaaaaaaaaaaaaatcagaaacaaccttaatgcccaacagtaagaaatattaaattatggtacactcataaatacaaatctttattaaaaataacactgtagaatacttaacatggcaattttttttttttttttttttgagacagagttttgcttttgttgcccaggctggagggcagtggcacaacctgggctcacagcaacctccgcctcccgggttcaaccgattctcctgcctcagcctcccaagtagctgggattacaggcatgtgccaccacaccccactaatattttttgtatttttagtagagacggggtttcaccatgttaggctagtctcaaactcctgacctcaggtgatccacctgcctcggcctcccaaagtgctgggaatacagatgtaagacaccgaacccagcctacctaacatggcaaattttttttttaaatattgagtgggaaaaacagatcataaaaccatgtgcctatgtatgctgctgttttggtgaagaatggagaaaacgacatgaaagaaaaaagaattacaaagcatatggatatggaaatatgggactacaaaaggacacacaacagaagttactacaaagatatggaagaatgagcagttcttttattttcctaaattcgcaagatttcattaaactaacataaatggacacagaatattatggtacaagctcctctatctggaggaagcaatgagtctgaatgtagagttcacaggactaatgagcaaatactctgacaataaagggtaatttgtatcagactctgagggggaaggagctcaactagggatcaagttcaaaagcatttataaaacaactgacaggtcttgtttttcagtgtgatttgccactaattcttaaataagaaaggcactcaagtattgctgctaactaaagaacaaactgaagatgcctcctggtgaagtgatttatagcaagcttcaatgctgaaagcaaacaaagctgttttaagatttggctacaatgtcagtgagtaatacaaagaatttaaacataaagtaattctatcacccatttccttccctccaacctacctcccttcagcctgttgagccactgagttaatccacagaagattttttccaacaatagatgatgaccagacagcaattccctgtatagcttcaggacaatgaagttcacatagtgcttctaccaccatcataatggttacttccaattcattcccctgaaaacgcattcagaaaagttagtcacccaataccattaaaacataaatccctataaaatttacaactgatcacagtctgtgcctgcttaaagccaaatgtatttaacaattattttcacaattttcacattatttagctcagaattctttaaaatgttacatataaaatagccacaaagggtgactaacagaaccttagcagcacatggatgtttgcacccccaccccaaagttacccaaacatttaacctgtgacctctgtaggaataacacatggagtaaaaagaaagcaaaaattaaatataaataaacaggaattaaagaatgattaacttcatgtgtttgaatactgcttgacattacctgaattgctaaacattttgttatttttggattccagttatttattgtgagcccactttcaagccaggaattactcaagcatttgtcatacgttataaaaacaatttctcctggccaggtgcagtggctcatgcctgtaatcccagcactttggaaggccaaggtgggcggatcacttgtggtcaggagttcgagaccagcctggccaacatggtgaaaccctgtctctactaaaaatacaaaacttagctgggtatggtggtgggtgcctgtaatcccagggactgaggcaagaagaggcttgaacccgagaggcggagcttacagtgagccgagatcacacaactgcactccagcctgggcgacagagtgctgtgtctcaaaaaaataaataaataaataaaaaatttcccccataaacaaattttcagaattacctttaaagttctaaactttgcacataagaaatatagttttaacatgttctaagatgaatattgttttaacatgaacaaaaacatgaacattattttaacttctaacactgttttaacacgaataaaataggtaactctggcagttgttgcttttacaaaatacaggatcaaaacctttgaaaatgaatccaagctttaacttattttatccatagattaaatcataccaaaggaattaaaccatgtttttcttattaacagacttaaaatgaatttcaaacacaccactttacctgagataggctggttgttttcatctctgtaagcaagtcaaagccatgtctcactgtcactgcaggctggcctgccaacaatcctaccctcatgatggagagtcgaatccgcgttagccagtcctgacaagtttggcgattggtatagaaaaaagttctagtcactttacgataagagaaagaaaagctcaggactggttcaatttgtaggtaaggatgtctcacctatatataaaccaaatacacaagtctattgtgatttcagctctgcacatactgccagctgtgaccattaaactgctataaaacaacactatctcatggaaaccaaccttgggaggtgaagttaatgcattagcacatccctcgtatgcattatacattaatttctccagatattccagatactgcagaagaagaacaagtctaagttggttgttaccatggccttcatcactgtctgcagttgtccactgactaacatcctgatcagggtttaatgtgtgagctgcgagacttcgaatgatacctgaaagcaaagacaacattctgaatttttaaaaatcttaaaagttcctagaataagtgtgagttttttatgatcaattcacatttatcaagtatcctctgtctacccatcatttaaaaataaaaaatcccaacatgaaagatctttcattttaggggaaaaaaatatatattttttccacacaactcccataagttttgggaaaaaaacaaacatatttccaatgcaattattcaatgaaagcttattctaacaaacatacctgaaaattactgacttcttttcaaaaaaatcatatactctcaaatctttaacaaagatttaaaaatccattatttcttaataaggctttgaaagtattcacatcacaaagcttgagcgagttaccttcaattgtctggaaggtgtcttgagctctgcccagtggggttctcagcttagaaagaacagtgaattgtgcagcttcccatacggcccactgccaaaggatagcatctgtcttcaggagattgcgtggaattgttgactggtcatgcttatccagtctctggcagctatagaacagtctttccaaccaattgtccttcctgggaaaagtagtttcatatttaaaagacaatgacaacttcattttaataatgaaaaaaaaatgcaaggggaatgggaataaggaactgtaattttccctactccaaaaaaaggcaaaacctatgaaattgagaagcattatgtcccccccctcttattttgaggtcttttatagttaacaggatgaggtacagcgtggaaggatgattagggtaaacggctcatgccggtcaggaatgaaactcattcaatgcaactaagcatctctagaatatctccacccccaccccattccccaaagtgttaatgacatcacatcagttaactgttaaccacatttcattactcaatttcaaagcccatttttgtttctacagatgctatcttcaaagtaattttcctattgatgaaaactgaaataacccatatgagaagaatgttacttgatactctgccacccccaaacatattttctcttcaaaactgcatgtaaagtaaagggaatcttaaaattatctttcctagataaaatagtcaaagaaatgccttaccctgttctatgagagttcccatacaaaataaaactaataacatcagagaaatcttgggggtggaatgtattacttggtgctttactcatgtgacttcttaatgctaaagaaatttcttgaatttctgtgtgattgttattgctgtagacagaaaataaagttgttgttacgcaaaatattttagcttaaaaggttagcacatactgtaagtggattatttacttattaactcactggaggtaaaaatatagaaaaattgagactttcaaatggatacggagatgtgattacaactttagatcctttttttattcacttcagatgggtcatgtgccgacatcataagaggatttgagggaggcatatcaaacatgtgaacataaaaacccaatcattatgcttatgtattacaaaaggatcaagtttaggctcttaaaagctcccaaatcaacttgatcaaaaacaataaaagattactgtttagtttttcaaatatctgagctactaagaaacatattttggcactacatgagttattctatactaattattgtgagcctataaagctcattaaaaatttttaattttcttgcagacctgcaaaatttgattatttgacatcacttcaatcactgacaagcagggccataaaagatgtgtcattaatgctctaataggtgatctgtcttctcctaaagtagacaaccagtagaggctgtaaatatcacagaatgtctttgctccaaaacaactgttataccttaggataacatctaaaggaattgatttcaacagttttccaaatgcttgtcgaatacgagttccacagtgcactagttgaacatggcaaacatcaacacatctatgaaagaacgaaatagacaaagcaggtgtgttaacatttcaaagttattaggattaatgtcaaaagacatgatcttaatttcatacctctgtaaaagatcatctggcaaggaagaggacagagcaggtagactgctgcatgcctgcagacagatattcacatcttcaacgagaactattaaacattaaaagacagctactttcagctggccaaaagaaattatatcccagtttgtcataattatctgaatccattcattcattcaacaaagagtgagtgcctactctagactaggcactgttcttgtccagaatcctcattgactgtcatgtttggaaaaatgacacattcaacaaaacccacgtaatgtaactgatgggtcatcacacaaaactttttctgagagaaaatgtaaaagtatatgcaaactataaacattcacgtaagcttaaaaatgtgacaatcacttcaaaacatttttctaatactaagaatgaaaaaaaatcaagactgtgtatctgtcattaaaatgaggattacacatctgcaggtcaggaaaagagctctattgatgaccatctcccattaccaaggattgataaacaaaatagaaaaaaaaaaacagagtcttactgttggctaaaaggcctttgcaaaatttatggaaagacggaagacagaataaaggtgcatatgtttcggacttcttcattaaaacagctacttccaaagcccaagtcattaacagtttcctgaaacacaaaatatacagttgactgtacattaaaaacaataacaaaaacaaaaaaacgttaaaagcctagtcttcttacattggttttctcttggtttttcaaatatctcaaacaataaaaaataaaaataaaaaatgaaactatagaaattactgtcaaaattgttgtgtgccttttaagaaaacctcccaacgcagcatgataatagcaaagaggccgggcgtggtggcttacctgaggtcaggagttcaagaccagcctggccaacaacatggtgaaacaccatctctactaaaaatacaaaaattagctgggtgtggtggcgggcacctgtaatcacggctacttgggaggctgaggcagaagaattgcttgaacctgggaggcagaggttgcagtgagcaaaactccgtctcaaaaacaaaaaaagcatagaatattaaaaatctatatatattcttctatgaaacactgggggtgggggattgaggtttttcatgtatttcttttcagaaagaataagaaagcctagattaaataataaaaccaaattataaggtgtttgacagtaaagaagctgctctacctcacctctataatccacattttttaaaattttttgtaattcacatttcttattctcaaattataaaggcaaattaacaaagttaggaatagttaatactatataaaatctgttacctcgtgtcctggttaaggttatctttcttaagtaatattcacagaagatttaatataattgagaaatgtttctttgtggccgtagttacagtgctaatcacagctccatcaaacaaagaaggagaggaagaactgaggctactagagataaagtgatcatgcctgaaagacaaagcatagattatcttttcatctttaatcaaagaaagcaagcaagtccaaagttaaatcaacatacatctttaaaatctatccattaaaaaaataaaatgttttgtggggttcttaagaaaaatttgtgaatacagtacctggtacaatgagaatacaatgtgtagagcacagcatactgaatggcagggaagtgaacagccaggtcactgtgcacaatcatcagattcttactcagaagtgcaaagacagttggagatagcgcccacatctgatcatgtacaaaacaaagtaagtttatggcttctccaaaataagcacaagcatacagagtttatccttcaaaacaggggtatttggactttttttatttggacatttttaaattaaaattacagattggaagggatctagtacactacaccttggacaaatacttttttgtgaagtcagtaaagcctttgcgtgcaatatagcatctctatgcaatgcagcaactccttgtctatcgctacagtaagaaaacagccacaggtcaggtgttgtggctcacacctgtaatcctagcactttgggaggctaaggtgggcagatcacttgagcccaggagtttgaaaccagcctgggcaacacagcgggaccccatctctactaaaattacaaaaattagctgggcatggtggcgcacacttgtaatcccagctactcgggaggctgaggcaggagaatcgcttgaacctgggaggcagaggttgcagtgacccgagatcataccaatgcactccagcctagatgacaaagttaagactctctctctcaaaacaaaacaccagccacatacgaaacacaggaatgagagtacctgtgttccaagaaaactttcttgagtcggagtctctcgctctgttgcccaggctggagtgcaatggggcgatctcagctcactgcaacctctacctccggggttcaagcaactctccctgcctcagtctcccaagtagctgggactacaggtgcccatcaccacgccctgctaacttttgtatttttttagtagagatagggtttcaccatgttggccaggctggtcttgaactcctgagctcgggtgatttgcccgtctcggtctcccgagggattacaggcgtgaaccactgcgcccagcccaacgagaactttctttacaaaaacaggcactagtgttgcgatggttgtacacttctgtgaatatactaaaaatcagtgaattatacacttaaaataacaaacaaaaaacaggtgctgggctgtatttggcccacggaccatagtttgctgatctctggtctaaacagagccctttgtatgtgccttttgcggaagtagactgtatttcttcaattttccatatactgcaaatggcaaggtgccctgttcaataaggaaacaaaggcacaccctgccactatacaccttttccatccatcttgttcctttacactgccaagacactccattccacctgactgccccagccccacccactttctccttatttctagagtacaggacataaacatctttgaatctgcaaataatgtgaataattttcctcaaaaatcaagctttcatgtttgaagaagagtttattgtgacttcaaacataagctgtaactggtaataagcgaagcagctatggaattatacaaggcaatccaatcaaacaacatggagcacactgaagcgcaaacatcaaattttacctttttcctcctaaaaactttattccctaattacatccattactttctttctttgtttctttctttttttttttttcttttgagacagagtctggttctgtagcccaggctggagtgcggtggtgtgatctcagctcactgcaacctccacttcctgggttcaagcaattctcctacctcagcctccaaagtagctaggattacaggtgtgcaccaccacccctggctaatttttctatttttagtagaggcgaactttcaccatgttggccaggctggtctcaaactcctgaccacaagtgatcagcccgacgtggcctcccagagtgctgggtttacaggtgtcagcaaccgtgcccagcctacacctattattttctattaaaaataatgtttttcaactctgtgtggtccaataggaagaagaaatacacaaaccataaacaataaatacaaatcaagagcagggccacgtcgaattacttaaaaaaaaaaacacacgggctgggcgcggtggctcgtgcctgtaattccagcactttgggaggctgaggcgggtggatcacctgaggtcaggagtttgagaccagcctggccaacatggtgaaaccaagtctctactaaaaatacaaaaattagcccgtcgtagtggcaggtgtctgtaatctcagctactcgggaggctgaggcaggagaattgctggaacccgggaggcagaggtggcagtgagccgagattgcaccactgcactccagcccaggtgacaacagcatgactctgtctccaaaaaaaaaaaaagctttttttttcccccctcctaaaagaaagactacaggttgagtatcccttattcaaaatgcttgggaccagaagtgtttcagactctgtatatgtttggatttgagaatacttgcacatatataaaatgagatatgtgggggacgcgacccaagtctaaacacgaaattcacttatatttcatagacgccttctattcatagcctgaaggtcattttatgcaatattttaaataattttgtgcatacaacagtttggactcatcacatgaggtcgggtgtgggattttccacttggggcatcatactggtgctcaaaaagtttcaaattttggagcattttagatttaggattttcagattaggggtgctcaccagtaagtgttatgaaaatattccaaaatccggctgggcatggtggtgcccacctgtaatcccggcattttgggaggccaaggcaggtggatcacctgaggtcaggagttcacaaccagcctggctaacatggtgaaaacccatctctactaaatacaaaaaaattagccaggcgtggtggcgcatgcctgtaatccgagctacttgggaggctgaaacaggagaatcgcttgtacccgggaggcggaggttgcagcgagccaagattgcgccattgcactccagcctgggcaacaagagtaaaacactatctccaaaaaaaaaaaagtattccaaactccaaaatcaaaaacacttccagtcccaagtatttcagataaggaatattcaacctgtatgaatgttcctagggaaaaaaagacagccaaaatataagaccatgtataagaactaacttcagtagacagaaagaaaaaagtaccaggggaagaaagagaccgcattttaaaacaactatacaaatttgagctgtaagaaacactgacattttctataagcatgctagagcaaatgggagaaattcataagacgttttctagaaaataaaactaatataaaaaaacttatcaagatttgtcaaggaaaaagaagaaacgttaaatataatggcaagaaaacattcctaccaattttatttatccaggcatgtcttaaatatggctgtttgttacatacagtgattctgcagacatgttgacatgacagtgaaatacataaatatgtaatgagaaaaggcttaactgtggataaaacaaagtcattacaattaaagactcgagtttttggcatttccagttgtagtcagggcactgaggtcaaatttaactacaaattttgcattgtctacattgaacacatgattcttaaaagcctcatgttttatttcagaacaggcctcaggaagttgcagactgtgcaggaggttgtttagggcacaagtcatttctcccaatattaacttataggcagtctccaaaacaggaatattcttcaagctgagcattgcttgataaacagcatgggctacagcaacaacctgaaaaacaaaaaattcaaggaagtgataaatggaaaataaatcttctaaaattatatggaaaataaatcactatctgtattagtgctgatgatacaaataaatttaagattgatcaattcactgtccgtagcacttaatattttaatttttaaaaaaccaatcagaaaactgacacagatcagtaagctatttcaaatctattaagttttatcacaaataaagagtactataaatgaaaactgtcaataggaaatttccaaaatggccgtttttttttttttttaaataatcaacatcaaaagacatatgcaaacagcagtttaagactgggtttcttaaatctaccaggaaagtctgtggtggatttgactagggggtggttgaaaagccagtcatttttgtttataaaatatacagtacttaatttataactttataaatgtgtcaacttgttttacccttatgaaaatttaataaatttaataacagcaagagatgcataatctgaaaagagtatctggcacatcattcatgaaagtattcagtatgattatcaagaaatataaatttaaaagaacaaatacaatcactatattctaaatcaaacatttcacatttcactcaatttcacttatatagcctggtaagcaacattaggtccaactcttcagtgactcaagttgtcaaaattcattatcagtatattacttacctctttttctttatgataacgcaagaatagtagtttagatgatggtataaacagtttttctacaaatgatgatggcagtttcgtatttatctgttcaacaatctaaaagaataaaatttttaaaaaatgagcttctcaaattacaaaaagacatggagaaaccttaaatgcacactggtaagtgaaagaagccaattgaaaaggctacatactatatgactccaactacatggcattctggaaaaggcaaaacgatggagacagtaaaaagatcaggggttgccatgggcttaagatggagggagggaggagtggggagagggaacgaggaaggagtgggtagaacatcaaagatttttagggaagtgaaactatcctgtatgatactggtaataggggatacatgtcattacacatgttaaagtccatagaatacataacacaaagtaaactataaaattagttaataataatatatcaatattcactcctttgtaataaatgtaccacactaacacaatatgttaatgagggggaaactgttgggatgaagaaggtatatgggaactcattgttttctgctcaattttctgtatatctaaaaaataaagtcttttaatttagaaaaatatatctaagctatattttaaggccttaatactgtgacattaaagtgtttagacacctaaataggacacacgtattttacagttatcatgggcattttttcacattagcaaagagaggtgtaaatctggcagaaatgctcagcagaatgtcatctagaatttgctttaaaataatccagctggagatgaaaggatagcaaagaggcctagatgaaaccagatgggccatttgtttctaattatagaagctgagtgttaaatatgtacaaatttattataccatgctccctatttttatgtgcttcagaatgtccataataaaagtggggggaggatatttatggttaagaaattaaaggaggccggccgggcgtggtggctcacgcctataatcccagcactttgggaggccaaggcaggcagatcacgaggtcaggagatcgagaccatcctggctaacatggtgaaaccccgtctctactaaaaatacaattgtgccactgcactccagcctgggcaaaagagcgagactccgtctcaaaaaaaaaaaaaaaaagaaagaaattaaaggaggccaggcatgattgctcacacctgtaatcccagcacttcgggagggcaaggcaggaggattacttgagaccaagaatttaaggccagtctagacaatgtagtgagaccccttctctccaaaaactacaaaggttagccaggcatggtggcatgcatctgtagtcccagatagtcgggaggctgagtgggagaatcacttgagcccaggagtttgaggctgcagtgagctctgattgtaccgctgcactccagccaggggaatacagcaagatcctgtgacaaaaaaaaaagaaagaaagaaaagaaaagcaaaaaagaaagaatctggtgcatagagcaatgtttcctcagaaaaaacgagtaaagctacactgagactagctatcaaccactaaaaatagaggcctggcagagtggctcatgcctataatcccagtactttgggaggccaaggcaggtggattgcttgagcccaagaattcaagaccagcctgggcaacatggcaaaactccatctctacaaaataatataaaaaattagccaggtgtggtggtgcacgcctgtagtcctagctacctggggggctgaggtgggaggatcacctgaacccaagaggtcaaggctacagtgagccaaaatcatgccactgcacttcatcctgtgcaacagagtgagaccctgtctcaaaaaaaaattgcattaaaaataaaagtaaatagacactaaaatgaaagcatagattataagactgatgaatgtactctaaaaaataatataataaagcaaagcccttattttttttcttttttggagacagggccttttttgtcaccttggctgagtgcagtggcacaatcagagctcacttcaacctcaagttcctgggcttaatcgatcttcctccctcagcctcccgagtagctaggactgcaggtgcacaccactacaccaagctaatttttgactttttgtacagatggggtctcactacattgcccaagctgtgccagaattcctggatgcaagcaatccttctgctttggcctcccaaagtgctgggattacaagcatgagccaccatacccagacaaagtccttaatttcttacatatcgatttaagggcctgaataaaccaacacattaaaaaggaaaagaataattcacataccagcgtgagtaaattcaagactgagatgatataattggtaccacaagtctggcaattctccagttggtctaatccatatgtaatgaccatgtcacaatgtatagtcatgctaggatccaagctgccgagcaaaacaccaacacactcattagcagctgtcaacacagcctcagaaaaaaacacctggtttgcagccgtcacacatctcattactctgtacagaacctgtaaatggggaaaacaagcagctttttacaaaaattcacgtgcttccacaaagcaagaaaatactttttatttaatgcaatttcaactgaaaattaactgcttgccttgccagcagtctcttaatattctagttctcagtagctgaataataatgatccctttactacaatatgtaaacatgatcttggctaaaaaatcctaaagtgctactatgacaggaaatggaacctgccatcctctatttcccatatacccaacttcgtttctcccaatgtcactaaatggctgaagctcagaatctttatcatgaaatacaccacgacagtaatggtattgacagcatgggaatagcctgcccacacatactacaagctagctcttgggcttttgggaatcaatctttcaaaactgaacatacaagtcactttaagcttattaaagtttctatctactgatggtctcttttgaaagataagcactctcatgcttaccacataatatcttcaaaaatcatattatttccaatacacacacaaacaaaatcccccacttaactataatggccaataattgtgtactaaatttctaataaaatgggggagaaaacagagcaaatgtttaaaaatatttctataatatttaacaaccaatacatacaggattttatttagtctacccatagttttcattaaaagtatccttggaggttgggcatagtgactcacatctatcatcctagcactttgagaggattagctggaaggttctcttgagtccaggagtttgagaccagccatgtcaacataacaacacctcatctctaccaaatttgtttttaaattagttgggcgtggtggctcacaccagtagtcccaccaactacttgaggctgaggtgggaggatcacttaagcctgggaggtcaaggctgcagtgagccaagatcgtgccactgcactccagcctgggcaacagagaccatgtctccaaaaaaaaaaagagtgggggagagagggcggagggggaaccattcttggccatgcatgcacagtggctcatgtctataatcccaacactttgggaggctgaggtgggaagactgcttgaggccaaaagttcaagaccagcctgggaaacactgagaccccatctctacaaaaataaaaaattagcaggagctgtggtgggaggatcacttgagcccaagatacagaggctgcactgagtcgtgatggcaccaccccactttaaaaagaaaaacaaaaaaagctgggtatggtgacacccgcttgtagggctgagtgaatgggaagttcacctgggcccaagagttcaagactacagtgagctatgattgcactactacactccagcctgggtgacagagtgaggctccagctccaaaaataaataaaaaaaataaaaaccccaccattctaccattctcaaaggcctaaaagatcctcataaatcaatatacacctatcctataaattatgtcccttttattttatgtctgaattaacggctttttatttcaactctgtacagtcttcaaacaaccaccttttagacattaaaaatgaagcaaagatattaaaccattttgaaaccatattggtttaaaataccaatatgctggtttcatttatctttaagttctgacatttctgctcaagtacacaacttactatataatcaatatcctattttatttagcaacatgttcagcaaaagtatatgctcctaaaagcgagttttatcctaacagtaaaattttcatcagttagattaaattttttatgactgtatcacacatgcttctttctccttattcaaagcagagtacaatgcctggggttcacttcttgtgtcttttccactgaaccctcattggatgtgctatatacagtgcagctaatgtttgaggctgctgaagtgtggcaatctagctacctcatttttaatttgtttatgttctttgatatcaggctatcaaagaatataaagatatacaagttttcatatgagttccatcttatgctcagagaaggttactttctgaggcttctcctatagtgtgctattcgtaatatgttgaaaaactaaaaggaaacccaataatttaaaagtaaaattataagatatattatttaaaaatgaaagaataagatttaaaaattcagagtggccttttgtcatgggagggtaggggagttggatgaaaggaggatgagatataacaggattccctgcttttctggttatttaagaaagcagtcagacaatatatacatatatacatacatacacacatgctaaacaaatgaaggattaataacagttcacctggtaaagagaatcatttacaatgtaaaacaattttatttttgaatgacacttcaaatgcccaaaagcacttacaactgttacgtatgcctcagtaattggaggacccgaattgggctgaagcgttccccaatgctcctcagcacagtactaaatacccggagaagcgcagccagctttggtgatgacactgatggaggagggacgtcttcatccactgattccccagaggccacatggctgaggtcctagatgtgaattcacagcattcttaataagtagtacattgtttaaaaaaaaacaaaaaactctaaaatatttcaatcaattcattttagaatagatttttaggcttttagaaagagaactgtggcccatgagaatattcatgactctgaatataaaaatgggttttacctaattatttcaaaaagccaacattaaacccaatagacaacaaattaaggaaataatctcttaaatcaactcagaaagctgttggggaaaaataaattctagcacatatgctctagttatatgtaggtataaatgaagacggaagcttttgccactcctgaattagtttttggctaaaaatctcattctaggtattctttgagccactcagctcaacagtaagtcctccaaaccaagagcatgcacatgaagagcaaagggagattacaagacctggtctacagatgtgtaactgaagaagtacgatatatgaaaaggacaagattcgcaaaaactaggatactagaaccaatgtatacatctacctaaaattaagcaccaaaataacagaagagaatgagatcttaaggataacaaggggaaacatctctacaaactagaatgtgtggcttatgagaggtagatcagctttaaacgtgggctgtgaaaaaagacattctaggtgtgggggcaaagaaaaaacaacgcagaagcaaaacatttccttgcttttctaggaaagagtaaacacatcagtacagctaaaggtactgaattcctgttgactacaagcagcaaagatgaaaaaaacaagatgaggccaaaatctttatgggagccttgattggttgatctgaataggggagaaacacaaagagattcagataagagatggcacagagttaagccatgacagtgcggccagaaaagccaagtaccagtaacagaggcttcagcagcgctcttaaagctcctatgctatattcgtacagccacaaaagctggctgaagccaaggcttgtcctccaaagtacgattcaagttctcctgtacatatgtaagaggaaaatctttaggagcttttggtgttttgtgtttttttataacacaacatcaatttgctttaagactctgaagactggggacaaaaaataaaaataaataacaaaaaatgtctttagaaaaataccagctaccaagagtatgtaaagctttgcgaaatacgaagcttgcaacgtttcttttagtctctccagtaattctcctggtaatttaaacacatctgaaataaatgtttaaaatactgactgggcacgggggctcatgcctataatcccagcactttgggaggccgatgtgggtggatcaccagtggtcaggagtttgagaccagcctggccaacacggtgaaaccccgtctctactaaaaatacaaaaattagctgggcgtagtggcgggcacctgtaattccagctactcaggaggctgaggcaggagaatcatttgaacccaggaggtggaggttgcagtgagctgagatcgtgccattgcactccagcctgagtgacagagcgagactccgtctcaaaaaaaaattttttttcaaaatattgcgatgggcttgtaatttctgcttaaatgtcaggaggtctgagccattttaaaataaatctagcacaattttaagattttttcttaaccaaaattttaagaaacagctttctatatactcacctcagcatatgcttccatgtcttctagaaactgaccaagaagagtcgtaggaaatgcaagatcagctacccaaaatggctccaaactctgcaaccacccttggaatcgtataagaaattgtgaaagggtaggggggagaaaaaacaccaaaaaatccaaattaaaaaaatataagaggctcgttttaaaaagtatctggttttcaagcagcataccctaaaacatgtcctatatcataaaattaagactgctaaacatgctgatcacgattaaccaatacctctttaatacctctttaatttctgcagaaattaacttgtaaatgttatttccttactttttcagtaaatttcatatctatattgtcactacacatgacttaagactaaaatgccacaatctaccattggcctggctaatcccagggccacatctaaccattaaaggtgtatactcatctcctcagtgaaaatgaaacagaccactatcacctgaatatcctattttcaaaagtttattacaccaagtaagttacgagaaactatgacacttgaaacaagctgaaatgtgcaaatgagccacgctagtcattcacttaaatccaaaaaaatgggaaacaaaaccatttctcatttatgacaattctccaaattaaccctatatttccttttttaaaaaaataaccagaaaaacaataaaatgtgacaaataacttggatcttccattgtccacttcagggtattgccactgcaatatattcttaccatatactttcctaccagtacaaactacaaataacttgggtaagtcctgtctgtacttactctacccacctactagtaatttcctctgaaaatatatatttagctaacaagtcacgttcatttacaataaaacatttctctgaattagttttcttgcattattaaagaaatggtattggccgggcgcggtggctcacgcctgtaatcccagcactttgggaggccgaggcgggtggatcatgaggtcaggagatcaagaccatcctggctaacaaggtgaaaccccgtctctactaaaaatacaaaaaattagccgggcgcggtggcgggcgcctgtagtcccagctactcgggaggctgaggcaggagaatggcgtgaacccgggaagcggagcttgcagtgagccgagattgcgccactgcagtccgcagtccggcctgggcgacagagcgagactccgtctcaaaaaaaaaaaaaaagaaatggtattgatagatggtcactgggggaccactgctcctccccgacagtatttaaataactggtataggctgcaagacttaccagatacctgctgcgtgagcgaaggtttctgagtatgatctctatgccatccaactaatatatcaactgtatccttgatggaaacaaagagagagggggccaatcattttaagatattactgccattcacctgtggaccatttcacagcaaaagatcctaaaaggagcatctatgttctacctacttgacattctagaaacttagaaaggggagaggggcaggaaaataaaagaactacatttctgacaacaatgaaatagtttattttcttcaaatattttaaggtacgaacgtcagaaagaaaaatgcggcatttaaccctggaacctcaaatatcactgattatattcaaaggagcagaggcattgttttccatctgattcctcagttcctcacacacacaaccatccccctcaccccatgatctgaacaacggaatgaggaactcaccctaaaattagcgctgaaaatatgagggtaacatcgagccaccaaaagaatgcacttaacacatttgcaaagcaattctggtgtatccacattttcaagaattgactgcaggctggtcattacaagcttaaaaataaaagttacaaaccgtgaacattcaacaaaatagggagaaaacaagcaaattaggttcattatttactgactacataaaaaactgagtatgagaccaagaaaaatagattctgtagttttagttaaaaaaaaaaaaaaattcacttgtaaatcccaactgcttgggaggctgagacacaagaatcgcttgaacccaggaggcagaggttgcagtgagctgagattgcaccgctgcactccagcctggacaatacagccagagtccatctcaaaaaaaataataattaataaataaataaataaattgaaaatatttcgctccactaagatgttaagctaaaaacaaatactgctttctcctcttcaatgtttgttaatattagtcctttgacatcagttaacattagtccttaataacatctgtttacaatatccctaaatgctctctttaagattctacctgtgattaaatttcaaatacaaaaaagtaaaatggatttgggaaacttttctataaagtacaacaattactttgcaatccaaaatataaagcaaattttatataatttatgctttagtatattagtacttgcttcatattaaaattaaagaagatcagtatggcaccacacatgaataacatgcaggctcaggttaccattatacataaatttttaaaataaatatatggcaaaaataaaataataaataactatttgtcattccattgaaagaatatttattttgcagctgttaaaaaacatttttccctaaaaaaggaaaagctgcgctttacatagcaatcttataaaagaaatgctagaatcagaaaaccatcattttacgctgggtgcagtggctcacacctgtaaccccagcactttgggaggacgaggcaggtggatcacctgaggtcaggagttcaagaccagcttggccagcatgatgaactccgtctctactaaaaatataaaaattaacagagcacagtggcacatgcctgtaatcccagctactcaggaggctgaagcaagagaactgcttgaacctgggaggcggaggttgcagtgagccgagatcgcgccactgccctccagcttggacaatagagcaagattacatctcaaaaaaaaaaaaaaagagaaaaagaaaaccattattttgcaatagccaatgttataatctacacaggcacagactatcaatgctaaaaatcatttaaaagacatcttaagggtaattacagaaatttgaatatagaacacatatgtaataaaattcattttcttaggtatgattacaatattcttgttatacagaagaaaaaccttattcttgggagatgcatactaaaacattatggggtgaactgtcatcatgtatatggttttcagatgctcaacaaaagtgtgtgagaaaataaaactgtggcaaaatattagtaactggtaaatctaggtgaagcatatattatgaaattattatcgtatttacaggtatttattttactggtgcatctatctttctatgaatgtgagaattttcacaagagatgggaaaatgttcataattatgcatgcagaataagcccaagctggtggcattctgttcagttacaggtaattttctgaatcctccctcaaatttttctcaaacctctataatcaagggggaaaatgtttcgttttgttttgcttttttgagacagggttgcctataatggagtgcagtagcttgaccacagctcactgtagcttcaacctcccaggcacaagcgatcctcctgcctcagcctccaagtagctgggattacagatgcatgccaccacgcccgactttttttttttcctttttttgatagaaacagggtttcaccatgttgcccaggctggtctcaaactcctggactcaggcaattcaccggcctcagcctcccacagtgctggggttacaggagtgagccaccatgcccagttaaaaatacattttttatttaaaaaaaaaaaaaaagaacattccttatatttcctttatattttttaaactacatacccaaaataaagcatatcaaaaactgtattaaaaaaaaaaccctaatatcagatattccaaacacaacaataccataatttaatcacttaaaatcttactcaaaactaaatcaatgatcttttaggccaggtgtggtggctcatgacactaatcacagtactttgggaggctgaggcaggaggatcacttgaggtcaggagttcaagaccagcatggccaacacaatgaaaccccatctctactaaaaatacaaaaattagccaggctaatggcacactcctgtaataccagctactcgggaggctgaggcaggagaatcgcttgaacctgggaggcagaagttgcagtgagccgagatcatgccactgcactccaggctggacaacagagcaagactctgcatcaaaaaaaaaaaaaaggaatgatgttttaatatattcagatacacaaatgtgaaataaaactaagtagagctggtattcatttacacataattatcttataccatttggaataagaatttggggcacgttagcaaaccaaaaggctcagaaagaagttgtgatatttagttcttgtctccctctacaaatgtgaagcactcttctatccagcattcctagtggagttcctattttcaaatttgcaaatcattctggtcctaagcaatctcaaaaaaacatttctaaaaaccaaagaggaaaaaaatccttttttttttttttttttttttttttttgagacagagtctggctctgttgcccaggcaatggtgtgatctcggctcactgcaacctcggcctcccgggttcaagcgattctcctgcctcagcctcctgagtagctgggactacaggcacgtgccaccatgcctggctaatttttgtattgttagtagagacggggtttcaccatgttggccgggatggtttcgatcccttgacctcatgatgttcccacctcggcctcccaaagtgctaggattacaggcatataggccaccgcgcttggctgaggaaaaaaatcttaaaactaacttatttcaaatctaacttcaacgtgtatctttttttttcttttgagacagagtctcactctgttgcccaggctggagtgcagtggcgcgatctcgactcactgcaagctccgcctcccaggttcacggcattctcctgcctcagtctcccaattagttgagactacaggtgcccaccaccacgcccggctaattttttttgtatttttagtagatatggggtttcactatgttagccaggatggtctcgatctcctgacctcatgatccgcctgcctcggcctcccaaagtgctgggataacagacgtgagccaccgcacccggcgtgtaagccaatttcttagaagaaatctctccctctttctccacatatatgcatatatgtatgtagcactaatccttgaacagtgtatcctttactcaaactgagaaagaggaatttttaaaacatatttcctatcagtagataacccctattctatgtttcccttcttcaagctcccctccaaggacatgtgttaagggacaattttcttcccaagtacatcatgcatttttcccccttcattcttacctgcattacagatgaaaaggctttcttttctcctacagtctctagtgctttgtaggtggcacataagtagaggagtttaacttcatcttttgcagatgagctaaatttgctaaaaatccacttgaagatcttctcagcctcatagctcagagaagcacaaagaaggccaagacagcaagctccctcctgtctcaactcctgaagcaatttgctactgtgtttattttaatgcaaacaaaaaacacacacaaaaggcttaagttttctatgatgacacgagtaatacatcttacaaaagaatgtcttaagtggttttttaaatttctattcaaactacataaaaggttgaaattttctccactctaaatactacattctgtctagcctgcattgccctcaagtatctgtctgacattactttctttttacaaaatcaattatttacaaacagtgagggaaggcccaaaaatgctaaattccatctcaaactgtattaaataactctcagaaaagggcagcaacaaataattagataaaacactctatacataactacattctacataatatccaatatgtaatgactataaaataaaaaatggtaatagttaaatacagaaacttaaaaggataacagtaatgatttacatagaactttaataagtaactctataaaacaaaaccatcaaaaggcactaaggtttatgaccagctgagataaattttgggtacttgccaacactgcaaatctttgggaatcaccataacaaaaaatgaccacacacctctggagacgctaatagccagagaatatatggtttggatccactcttacccaaagaaggaaattcctttttacctctattctctaagcagtttcaaattctctagtttacaaaaactaattttattcttcatgcctgcatcaagagtttatgccattccataagtcaagactcagttatccagtgagactagtaaattaaaaaaataaaatattccagccaggcacggtggctcatgcctgtaatcccaacactttggaaggctaaggtgggtggatcacctgaggtcaggagttccagaccagcctggccaacatggtgaaaccctgtctctactaaaaatacaaaaattagctggcagttgtggtgcatgcctgtagtcccagctactcgggaggctgaggcaggagaatcacttgaacccgggaggtggaggttgcagtgagctgagatcgcaccactgcactccagcctgggcgacacggtgagactctggctcaaaaaataaatattcttttcaagtggattccatttgtattcaaccgtaattaacacataattaatgcagataaaaatgacaagacccactgaaatgtcaatagatgttcataaacaaagccagtgggtttgtcttcttgtgtattgttaagtaatttctaaaaatatattttaaagtcatttaaaccgaaccattattagttacttacctttcattaagcacatcatgtgcagcagccaagatattatccaattgtttaactagtacctttaaaagaaaacacatttataaaaacttcaaattcctatacttttaagaatagcattgtgtacttttttacttgtcttcccctccaaattctaattcaacagtactttactttctttattattcccactccccaatgagcatgtatcaggaatgtcatgtttcctttcagcctatgaaagaaattcacccactggaaacatagagctgtgatcatcaacaaaaaaataaactcaaaaagtttgttttatttactttgaaatccatttgaaaaattgactgatggatggagggatagatggagagatatgtgacaaggcagtatttagggcaaaacattaacgacaaaaattagatgatgggtttaacagattcaatgtcaaattctttcaacttgctatatatttgaaactactcataataaaatttggaaggaggagaaacttgctttgatccaagtgtcatctgcctcactagaccattttcattaattttctcctgctcattgtcaagttctttttttttttttttttttaagatggagtttcactcttttcgcccaggctggagtgcaatggcgtgatctcagctcactgcaacctccgtctcctgggttcaagcgattctcctgccacagcctcccatgtagctggaattacggtcatgtgccaccacgcccagctaattttgtatttttagtagagatggggcttcactatgttgggcaggctggtatcgaactcctgaactcaggtgatccgcccaccttggcctcccaaaatgctgggattacaggcatgagccaccacacctggcccatatcaagttcttaattggtgtaaagaaagtgaagaaaaaaatttaacccttcctatactttgttacatttctgttgttgttttaagagacaaggactccctctgtcgcccaggttgacatgcagaggtgtgatcatatctcactgcaaccctgaattcctgggctcaagtgattcttccacctcagccaggtgtagtggcacatgcctgaagtcccagctactcaggaggccacagcgggaggatagcttgaatccaggagtttgagactgcagtgagctatgattgtgccactgcactccagcctgggtgagagcaagatcttgtctttaagaagaaaaagaaattacatattagagagcattaagttcttgatcatcataatacagactttccccattcttaaactactcaaggtagcattacctagtttattatggaaacacaaaaatcctcatatttccaaacatactatacttaccagcttattttctggttgctgaataaattctttcaactgctttacagtgaccaatcttcagtctctgtcgtcttcccgggtgatcctccgaagaagatttgacagtcgagactcatcacaataagacatcgatctctctgtgaatatataaacattttgttgtccattgagtataaataagcaaaggaatttttaaattttaaaataatttttaaatttttaaaattaaaaattatttaaataataattaaattattatggtggctcatgcctgtaatcccagtactttggaaggcgggtagatcacatcagttcaggagtttgagaccagcctgggcaacatggtgaaaccctgtctccacagacacacaaaaaattacataaactagccagccaaggtggtgtgcacctgtagtcccagctactcgggaggctgaggcaggagaatcactggagcccatgaggtggaggttgcagtgagccgagatcaccccactgcactccagcctgggtgacagagcaagaccctctctcaaaaataaaattacatcaaaagtcacagtccactggtcaataaaagctcagggaatataggtcctatcgctcttttgttcaactctatattccaaatcccagcagagtgcctggcacataacagaccctcaaaaaaatatttgctgaaggaaacgagaaatgaataaccctaggccagctgaacacctcattccagaggactggctgggagagaaaaaagaaaggccttagtaacaacttcctttgggtccattccaaactgttttcaacatgcaggtaaagagcctgggtgtaggtaaattaaacaacttccaaggggtacggataaagcctcaatcgagtaaaaacaggatataggcttctacttatcatctaggtatcccactggaggaaagcctcttattcacattatcatcatttccctgggatgaagttttggggagccataatcacacatttagttcaacaaatgtctaattatcatctaccacatgcaaggcatgcctccactagaaaggtagcaaaccacaacttttctccccttattttttaatcacaagaacaagcacacaatagtgaatactattagtatattaacaatgcctttaaaaactagatttttgctgggcgaggtggctcttccctgtaattacccagcactttggaagggcaaggcaggcagatcacttgagcccaggagttcgagaccagcatcggcaacatggtacaaccccatctctacgaaaaatacaaaaattagctgggcacagtggcacatgcctgtaatcccagctactcaggaggctgaggtgggaggatcgctttagcctgggaagcaaaggttgcagtgaaatcacactagtgcattccagcctgcgtgacagagcgagactgtctcaaaaaacaaaacaaaacaaaaaactcaatttttgcaaaacattttcaactgtgctatttaccataattagccaatacatacgtaaacaacaaatcacaaagggtctgacagtttcatttctaaggtatgagaaaaaattgataataaaagaaaccagaaggctgggcgtggtggctcacacctgtaatcccagcactttgggaggccgaggagggcagatcacggggtcaggagattgagacctgcctggccaacatggtggaacttcgtctctactaaagatacaaaaaattagccgggcatggtggcacgctcctgtaatcccagctactcgggaggctgaggcaggagaatcactttaatctgggaggtggaggctgcagtgacctgagatcgcgccattgcactccagcctgggtgacagggagatactccatctcatagataaataaataaataactacaaggggagcaaaacacactggatccttttggagggtggggggtgggaggagggagaggatcaagagaaacaaccaatgggtaccaggcttaatacctgggtgataaaataatctatactacaaaccctcatgacacaagtttaccagtgtaacaaatctgcacttgtatcctgaatttaaaagttaaaaaaaaaaaaaaaaaaaaaaaagaaactacaatgtctgagagaagaataggatttttacaaatccgtagcccatagagtatttcaataaggacagataccaaaaatgtcatcaagttaccagctgggaaattaggctctacttacaattctgtcactagcaaactacctttgaagaagaggaattgtttactgaactactttagagtcactgtttagcttctataatatcataagtctaaggcttcaaacactctgttttaacaaacagcatacatagcctttgaattcattccacttgtgaaaacataaaaagaaatcagttttttaaaagttatataccaacaataaaagctacaggcacaaagattttcaccaagatacacgaagcacacacacagtataaaaaaaaaaaaaagtcaaaaactaaatgtccaaaaagtaattacatctgacaaagcccataactcagctttaccgataaatttctctttaaggaaaaaaattatcattacctctaatcctctgaactttcttttttgttgttgtttttttgagacggagtctcgctctgttgcccaggctggagtgcagtggtgcactcagctcactgcaagctctgcctcccgggtagctgggactacaggcgcccaccaccgcgcccagctaattttttgtattttcagtagagacagggtttcaccgtgttagccaggatggtctcgatctcctgacctcgtgatctgcccgtctcagcctcccaaagtgctgggattacaggcgtgagccactgcacccggccaatcctctgaacttccaaggcactcacctatacagtgaggctacgccataaggcagaaatgctatcagtgtatttaactttagaaaagtgcccactctaggcagggcccagtggctcacgcctgtaatgagcacatgtgatcacttaaggtcaggagttcgagaccagcctggccaacatggtgaaaccctgtctccactaaaaatgcaaaaatcagctgggtgtggtggcatgtacctgtactcccagctacttgggaggctgaggcacgagaatcacttgaacctgggaggcggaggttgcagtgaggagagattgcagcactgcgctccagcctgggtgacagagcaagactctgtctcaaaaaaatatattgaaaacaacaacaaaaaaaccagaaaagtacccactctagggggcggggggaaggagagcatcagcaagaatagcttaatggatgctgggtttaatacctagatgatgggatgatctgtgcagcaaactatcatggcacacgtttacctacataacaaacctgtacatcctgcacatgtaccctgaacttaaaagagaaaaaaaaaaaaaagacagaaaagtaccccctctatatatatatctatatcctccacaggcccaagagttcaaggacttgctgtagtaagagcctactatgcactatacattcaatatccacgataattgggtaaaccttttctgtaagatcttatccagtcttctaatcttgttttaagagaattctcttttaaaatgtactataacctttctagtgggaaattaacaattcacaggaaaagaatgtaaacaatttttacctgcacagtagactaatcaacttatgcctgtgcaaggcgttagtaagaggcatccagaataagaggagatacaagtctttggaaggtgtatgtgattggtccccattttcccagacttaccctgtgatttcctcatgtctttggtggctaaagcacgactgccatgctgaacactggtgaactcagggctggtcacattgttaaccctcagctcttgccccaacgacttccgaccataagtattttccccagatcctccattgacactgtagccacctacaaacagcaatgtgtacgttatttaaatatgattgttcgtttcattcagtcaatttcctgatagctcaggatcttactactcaatctgcagctcaaccagcctttgcttctcctacctttttcctgtactgtctgccttgaaaatcattttcatttcttttaatacacctttgaagttaaattaattttattttgatcccttcattggaaaataagcaaagaaatgaaaactaaattaaatcaaattttgcaccttaaaactttcttgaagtttagagacagtagccaagaggaacttcaaccttagctaaatatttttgaaaataaaaacaaaaatagtattgtatcttttttgtaagaaaactgcattgatgaattatgtacggaaaaattttaaattttaaaaataataaagtggataaacgtcctatgaagttttcagaaataacactgcatttgttattcgtattttaaatatattagaagaaagcgagaaagttgggggtgtaagaaggcaagaaggtgggataggtaggttcaaaaaacatgcttgtagcaataagaaaatatatatacccttttcgtcattctgtatgtcagcgtggactctggtatcatcgtgcctttgccgagacaccacagctgaatttgaaggttgcagtccgtaagaggaagaaccacctctatctctggatgaagaatattttaaattacctgggtcagctgatgcactatcagttctataaaaagagaaaagtttaagattagaactttaaataacataaataaatctttctttaaacaagcctctcttctcccaaattttacatttaaccattactattgtatttaatgtaatatgtactatatattatatgtaagcactcagccgtctaataagaagtctttcactgggaagagattctcaatggatgaaatgccaacttttcagtctcttctactgttctaaagacccattcagaaatacgaataactactgggattagggtgactttgctggttttagcattgaaagcctcctgtcccaggcaaaacaggacaattggttactctggtccagtgttctcctcacatgacttgataataagaataattctttctaaattctcccccatggagagggttaatcagtcaaaacatttcagcctttcctatcataaaaataaaaaacactggcagcatgtcagggacaggcaatgtcttaccaagttattttctaagtactgattaggtactgtagtattgaagaccccattgaagatgccttaattgtaaaggtagcaatcaaaattttaaaaagtaaaaaagaagacattttaagaaaataaaaggtatcagaaatgcaataacgttatatcggaaagttgtagttcataatctatttaaaatttaggtactgtttagaataatacctgatgcttattagtaaacaagtagggtacagccaagggtaaaagtttgtcctcatctaagtatctgctctacgcttcaactgcctcataagtaaaacagagctgagttacaagacttctcacgagtgttactctttcagccatcaatcataaactattaagaaagaagacaacaaaataatctgttatagcatatgaaaaatccaagtaagttcttcccctactgattttctcctgagaggaacaactttgaggaaaaaaaaaaagaaaatcacttctatgatatttactaaaaatgctttctcaaccttttagaacctgaatcttttagaaaagtttaggacactggcaaggccagaaactaacctattcctctacgctttgcccctctatggtgtaaaagtgacagcagtgtttgtatactgtatatatttcatttagagtttattagtctttccttgctcccaaaaatactaaacataaaactttgcatgagctcaatcagttggacaccttgatctgcacttactgcaatcactgttaatacagaatgcagacaataggtccaattaaacttggatatctaactggtacaagtcattacttacaaaggatctcaatctgaaacttcatgaaattcaaaacctagcatactaaaatgactacggctccataaggagtaccttctaatattcagagttcgcttattcataaagctaagtacttcgaacataagggaaaattaaatctatggaatttcaagaaaaatgtatgagaatattttctgagtatactaagtctataagcattaaaatattaactcaatggaccataacttttttaaactaatgaaaagacattccttatgtacctaaaaatagcacatttaacatgcgtctatataaatcatagcataccattactttctgaaaggagactgaaatgtaagagagcttataatcttttctgacagggtgtgaactttatatgtacgccacagtaagctcttattagatgagcaaataaaataagcacttgactaattcagaaacacaaagataactgaagtctgccaatatttaaacatatcttcacttcctgttttcatcatgtttacttatctcctatactacctttactattaagagttaaatgtttgtatcattttctggtgacacagtagtaccataaggcagcagagaatacaagttaaaaaaagatctgggctcaaatcccagctccagcactgaaaagtatgtgtgcctttgcacaaattacttgatctccaagccttggttgtctcttgcataaaatgaggatgatacctatctaacatgtaaggttgttgtgaggcttaaataagataatgaattataaagaaacacttagtttgcagggtatgttaaaagttattatgaccataatacaaaataaactcagtttccagtctaaaagacaatgtacaaacagttcatgagtatatgaatataatcaaaacaagtttttacagtcaatatagagcaacttaaatacttcactgaagaaagcaggtaatctgtggctaccaacaatgtgtttccaactaggaagcatctgatttcaaactaaactgtaaaaccaggagcagcttccccattggttagaaataaggtttctaaatcccctaagttatgaacactgagatttttttcccaaaaaaatttgtgttttcagaaatatagcaaaaaaactggaatagagccactgtctcagaaatacctgaaaactccctagctgccaaattattttaatacaaattgatcaaagcatccccaaccagaactcaggttgtaagcattctgaacctaaaagcacaaaatggtttagcatttatacgaaatttctatttttatacaatcttgactgcttaggtttcaaaaaatgtcaatgtcaggctgttagcaccaacaagatcatcccagtccaataaatagaaaactgttaaagaacgggaatgagaacttaaaatgaggcaatcaaagccacaaaatagaaactgcagatttgaactccaagaagcaggcatgaatgttaggctagttagttagaagagctgaaagggatatcatctgccagaattagtgtctcaatttagtgaaaaaagaaaatctatctgttaagtctaagaatcctaacaaggatccaaaaatacttctacagcccctttaatattctaaaaatatcatggagagaaaaaaaaagaaatgcataaatttccccaaaacgatcaaactaaagttaaagcctgaggtacatgccacatgagaggtaagtttctaaagctcatacctcaaaaatcgcatactgtgtaacatggagcctttgtgatgttttgcatcaagtcaatctgtaagacagtagttacaatattagtgaagacagtgggttaaaacatttgttgttcaaacatggagcaaatatcattcatgagttaggtgcctttagttgaactatggtcccattagggttcatacattaaagcaaaaattgaggtggaaagccactccgtgccttacaggataaagaggcttaatgtggcaaccaaaaaatttttagtacataagagaatttaaatgttaactataacatacaaatcacatgcaaatatagttaccacttattttagttacctcttctcaatatacagaaaaatgccacaaatctaggaggccactggtttcaaatgaccggaatccttagacctcacaccaacaatccaccatgtggtggggatggtatcgcctgactaaatgtagtcttgcagtccattcttgtaagtattagagagaaaaagagagagagcgtcatctctgcaaagtgtgaagtcagggacttccctactaggaagcatttccataaagcaccccaaaatgacttgatgcaaacaccacacctagtggtgtcactggagtaagcatcatattacttcaaattgcttttacctaggtttattaagggattttgctctcatgctgagatctaatttgtaatggatataaaccaggaaatgagatttgcactaaagccaatgaagtaggaatgtacttattctctaaagtagcaaagatagtctcactgtcacagagcagttataggatatgttgctttccatactaatggttaataccacttggaaatgatttacccttcaaaaataaattcaaggttttcccctgtaatgcctcttacctggattcaaacatgctttaatgaggaataagagaaagggtgaaactatgaataaccccgggccttgtatcattacattagaaacactgctctaaatatgagtctatggctaaaatattaatttgagaggctcagggaatttattatacaaatctcttcttgcagagaactttaagttcaaatttaataaaacaaaacagaaccattccacgtcaaaattgtaaatgagtatgcatcagttttgcaatactgagatactaaattaatataatttattggtaaaactagtttaactacctcagtattaagtgtctataataaccaaatcttaattatccatttatgggtgatttgtttccttttttgagacagggtctcactctgtcacccaggctggagtgcactggcatgaccatagctcactgcagcctcgacttcatgggttcagcctctcaaacagctgggaccacaggtgcatgccactccatttagctaattttttatttttatgttttttggagacaggtgtctgattatgttgctcaggctgctctcaaattcctggactcaagcaatcctcctacctcagcctcccaaaatgctaggattagaggcatgagtgaccacatctggactgtcaccaatttttaactgtctctcaactaaacagccaatatagactgataaaatatacttaactattgtaaaattgtaaagaattgtatcttcaccaaggagaggtctggcttttacctgtgaattctggaaggtaatctctaaactcttgaaatgtcatacctaataagagggtcctggccaggagcagtggctcacacctgtaatcccagcactttgggaggccaaggcgggcagatcgcttgaggtcaggattttgagaccagcctggccagcatggtgaaacctgtctctactaaaaatacaaaaattagccaggcatggtgacgggcacctgtaataatcccagctactcaggaggctgaggtttcagtgagctgagatcatgccactgtactccagcctaggcaacagagcaagactatctccaaaaaaaaaagggggggggggcggcggtggggggaaagtgtccttgttcatctgggggctttaggccacagcagagtctaataatgtggcttatggtgggggctttgagtcacatggatcagcttgacctccagtggggctggagactaaggttagccacatgggcatgcaaccatggaaccccagtaaaaacgttggacataaaaaatagagtgagcttccctggttggcaataatccatgagtatggtcgcacaccagtgccaccaggaaggtgtcatttttcacaactctacagggacaggacaattcaaaactccaacatttggaacttccccgaactctgccctatgcacctctacccttggctcattctaatctgaatccctaaactgcaataaactctaactatgggtatgagagctttcaatgagttctggtgagtcctcctggcaaatcatccaacctaagagtggtcttggccaggcacagtgactcaagcctgtaatcccagcacttcgggaggcccaggcaggcggattacttgagctcaggagtttgagaccagcctggcaatatggtgaaactgtctctaaaaaatatagaaaaactagccaggcgaggtggtgtgtgcccatagatccagcaactcaggtggttgaggtaggaggactgcctgaacctgggagggaggaggtcagggcacagtgagccgtgatcatgccactgcactctcgcctgggtgacagagagaggccctgtctcaaaaaaaaaaaaaaagagtggtcttgggaacccccaaacttgcaactagtattagaagcaagggtcatcttatggactggactccctcttactctgcactcatatttaaaaccattaaatatactgtagctcaaaaaaaattgctcctttgttttgaaaaagggtctcacactgtcgcccaggctagagtgcagtggcgcaatccgagctcaagcaaacctcccacatcagcctcccaagtagctgagaccacaggcttaccccaccacgcccagcaacttttgtatttttttgtcccattctctacaacattcccaaaatgttgcccaagctggtctcgcactcctgagctcaagtgatccactcacctcagcctcccaaagggttgggattacaggcataagccactgcacccggccataaattttgttttttagtaacatttctagcaaacatgataaagatttgacttcagtgttgcttattttccttccaaggaacctctaatattctctattttcagaactccaatcaaattagccagaaagagcaaacgaagccaataaatctaggagggcaatagatctgattttaacccttgtttcacatgcacaattgtcttcagagaaaagctgaagaaagtaccccctcacctccatgccccaatgctccttttctctgacttcaagtgggcctctgatgctgcccacatttccctcaccaggtttctttcctttccaaaacatctgtaaaactttctgcaccttcttccttctcccaccactaccagtggatgaccttatagatttctgctccatgagaaatagaagccatttgacagcaccctcagcaagagctaacattttagctcctaacaagagctagtgggcaactgatccaagcagtttacaaatgtttatcatgtcatttcgtgttcaacacaatcctattagttataacttgataactaaggtttcataactggcctaaggttgcacagcttgtaaaaggcagagtcagaactcagacccagtactgtctaatgtttgagctcttcaacactccatcgctgcctgtcatcttccttctaatatatccacaaattcacctgcatctgcacatacaccttttcttcccatcatcttcccataatggaacaaataaacctcctatccatagaaatcatctggatctgtctattccccccattttccaaggtatgtcttgtcttttttttttgagatgtagtctcgctctgtcgaccaggctgaagtgcagtggcgtgatctcgactcactgcctcccggattcacgccattctcctgcctcagcctcccgagtagctgggactacaggcgcccaccaccacgcctggctaattttttgtatttttagtagagacggggtttcaccatgttagccaggatggtctcgatctcctgacctcgtgatctgcccaccttggcctccccaaagtgctgggattacaggcttgagccactgcacctggcctgtttcttttgtacgttgcaaaatctcccattttactactgcttatcacatcgtcaacatatgagcactctcaaaagtcttactttaaaaaaaacaaaaacaaaaacaaaaacaaaaaatggccgggcacggtggctcacgcctgtaatcccagcactttgggaggcaaagacaggcagatcataaggtcaggagattgagaccaccctggccaacatggtgaaaccccatctctactaaaatagaaaaaataaaactacctgcgcatggtggcacgcacctgtagtcccagctacttgggaggctgaggcaaaggaatcatttgaacccgggaggcagagcttgcagtgagccgagatcgtgccactacactccagcctggtgacagagcaagactctgtctcaaaaaaaaactaaaggccgggtgcagtggctcacgctggtaatcccagcactttgggaggtcaaggtgggaggatcatgaggtcaggagttcaagaccagcctggccaatgtagtgaaaccccgtctctactaaaaatacaaatatcagccaggtgtggtggcgagcgcctgcaatcccagctactcaggaggctgaggcaggagaatcgctcgaatccgggaggcagaggttgcagtgagccgagattgcaccatttcactccagcctgggcggcagagagactccatctcaaaaataataataataataaaataaatttaaaaattaagaaaataaggccgggcacggtggctcacgcctgtaatcccagcactttgggagggcgaggcaggcagatcatgaggtcaggagtttgagaccagcctgggcaacatagtgaaaccccgtctctactaaaaatacaaaaaattagccgggtgtggtggtgggcgcctgtaatcccagctagttgggaggctgaggcaggagaactacttgaaccccggaggcggaggttgcagtgagccgaggtcgcgccattgcactccagaccgggcaacagtgtgagactctgactcaaaaaaaaacaaaaaacaaaaaaaccctttaactgcctttctccctctatcaatctaatagcctggactcttcacagacaaacctgttgaaaaatttatcttccttgccttcatttactttttaacccactttaatctgggttccacctgcaacacaccactgaagctattcctactaagataggaactgccactcaaggccttcttggctctaaaagcccatgagcctttatcagttcaccttacaatttctcaataccattctaaagtttatgagttttttaactttaattccagtgactctttctactttatcccaatccaagtattctcctccttctttactttttttttttttttttttgagacagactctgactttgttgcccaggctggagtatagtggtgcaatactggctcactgcaacctccacctccaggttcaagcgattctcctgcctcagcctcccaagtagctgagattacaggcccctgctaccacacccggctaatttttgtatttttagtagagacagggtttcgccatgttggccaggctggtctcgaactcctgacctcaagggatccacccgcctcggcctcccaaagtgctggaattacaggcgtgagccaacgtgcccggccccttcttcacttctttaaccagcttagatttcattgtgtatcatttcaacaacactcttgcctatacccttaactcttaagattttcatcacagccatctggcaaaaccccaatcctggataaacccaacgatccatcaataagcaccacactcccaggtcctccagtgtttacttcccattctatacatgcactatccagacattcccattctcttcaaattccaaaatatcctatccacctgccctccccatacacacattctacttcaccaacaacaaaaaaaaaggtaccagctgggcacggtggctcacacctgtaatccctgcactttgggaggccaaggcaggtggatcacttgatgtcaggagttgggacaccagcctggccaaaatggtgaaacctcatctctactaaaaatacaaaaattagctgggtgtggtgatgcgcacctgtaatctcagctacacgggagactgaggcaggagaatcgcttgaacccaggaggtggaggctgcagcgagccaagactgcaccactgcactccagagcctgggcaataataagagcgaaactccgtctcggggtagggtggggaagataccataaaatatctgcacccgattctagaccttactgaggattccatctacttccaccttactgtaactttgcaaatacttttcccactgaactaaatcccccccataaacaagcaacactttctaatgtatcccattgaaaaatacaaaaacatataaaaaggaaaaactccatcaatcccacatgtccctccatcaaacaatctgccttacttgctgcagccaaactaaagttgtctagactcccctctcccatttcttcagttcttctagctccttaacacacactggtccaatttctgccccatcactcttggcaaaatccattatgacctccaggctgctaaatccaagatacagttcaggcctcaatctgctcatcctttcagcagctttcacagggctgctgagtagggttgagcagttttgccctgcacacaggtgccctgcagaggaatgaggtgggctgaatgaaactccttttttaaaaattctcggctggcatagtggctcacgcctgtaatcccagcactttgggaggctgaggcagacggatcacttgaggtcaggagttcaagatcagcctggccaatatggcgaaaccccatatattaaaaatacaaaaattagctgggcgtggtggcgggcacctgtaatcccagctactcaggaggctgaggcaggagaatcacttgaacccaggaggcggaggttgcagtgagccgagactgcgccactgcactccagcctgggcaacaagagagaaactccatctcaaaaaaaaaaaattgtttatgccaactaattgtacacctaaatgcaccaagttcatgactttctccttgcatttatttatttatttattttttaattaggtctcactctatgttgcccacgttgtagtgcagtgtgtgattacagctcactgcagccttgaactcctgggctcaagagatcctctggtcttagcctccccagtagctagaactataggtatggagtggctctctgcctttatttctaacccaagctaccttacaaccttaaaaagagacgctgcttcgccaggcacagtggctctcgcctgtaatcccagcactttgggaggccaaggcgggcggatcatgaggtcaggagttcgagaccagcctgaccaacatggtgaaaccctgcctctactaaaaatacacaaaaacttagccaggcctggtggtgtggcgcctgtagtcccagctactcaggaggctgaggcaggagaatcatttgaacctgggagacagaggttgtagtgagccggaggttgtagtgagccgagatcacgccgctgcattcccacctgggcgacagaacgagactcaaaaaaaaaaaaaaaaaaaaaagagagagaccctacttcagctctcaattgcatcgcttatcttccccttttgtcagttaagtcctggaagtaccctagaaacctatcatttggcctgggaaattgccaagattgaaaggaaatgtcttactctatgacctctttaacagatgaaggacaaaaaaggctgaaaatgtacaaagatatgcatccctcccccaccagttaaatgccaaacataggccagccacagctgatcacacctgtaatcccagctgtttgggagtccgaggcaggcagattacctgagttcaggagttcgagatcagcctggccaacatggtgaaacccagtctctactaaaaatacaaaaaaattaggcaggcgtggtggtgcacatctataatcccagctactcgggaggctgaggcaggagaatcgcttacccagaggtggaggttgcagtgagccgacagctcgccactgcactctggcctggagaacagagtgagactcagtctccaaaaaaaaaaaaaaggccaaacatagcccattccaaccaagattaagaatcactaagagttacattgcaccactgcacaccagcctaggtgacagagcgagactccgtctcaaaaaaaaaaaaaaagagttagttacacactgcagaaatctaaacaatctcaaaagtagactgggactttataatcaaggtaaaggtgaagtgatgtttaccaatataagaaatgaataggccaggcgcggtggctcacgcctgtaatcccagcactttgggaggccgaggcaggaggatcacaaggtcaggagatcaagaccaccctggctaacacagtgaaaccccgtctctactaaaactacaaaaaaattagccgggcgtggtggcaggcgcctgaagtcccagctactcgggaggctgaggcaggagaatggcatgagcgcgggaggtggagcatgcagtgagctgagattgcgccactgcactccaacctgggtgacacagcgagaccccgcctcaaaaaaaaaaaaaaaaaagaaatgtatgcaaccatttttttcaactcctgaaaatagtcagataataactgtagttattctgataaagttcctttagccaacaggttgaagcacattcccagggaataacatgtttataagattttctaacaattgcatatgttaaatcttctctttaaaaataatcctggccaggtgcggtggctcatacctgtaatcccagcactttaggaggccgaggcaggtggatcacttgaggtcaagagttcaagatcagccagaccaacatggagaaaccctgtctctactaaaactacaaaattagccaggtgtggtggtgcatgcctgtaatcccagctactcgggaggctgaggcaggagaatcacttgaacctgggaggcggaggttgtggtgagccgagatggcgccattgcactccagcctgggcaacaagagcaaaacttcatctaaaaaacaggaaaaaataaaataaaataaataaaaataaaaataatcctaggccaagctggctacagtagctcacacctgtaatcccagctactcaggaggctgaaacaggaggatcacttgagcccaggagtttgagaccagcctgggcaacacagtcagactgtgtctctaaagaaaaaaatcgtcatcatcctaggccagtccagacaacatagcaagacctccaactctaaaagaaaatgaaataaaaaattttaaaagtcaatttaattagaggtctcaagtaattccagaagatacagtctcacaaatcaaatactgagaaaggaagacacctttcaagataatcacactattattttaactgtaggaaaatgtattaaatgaagacagcttttgctagctgctgaaacatactagtaagaacaggaaacgatgctcccaccatgctcagcagtagccagaaatttactgaggtctttgtatttagccttaagtataagacacctaggaaacttcaaaatcatcacttaagccactttaaacccacagtctatacaaaccctttttcttttgttacattttatactaaacacactttaatcagactgacataagtgatttaaaagtaacttttataattcccttttacaagaaaaaaagaaacaatgtttccagatactaagttccttaagagacagcaatcatttattatagatttacagtactacaatttcaaatagtaccagaatctttttttttttttctttgagacagtggcacaatcacagctcacggtagcctcgacctcctgggctaaagcaatcctcccacctcagcctcccaagtaggtgggactagaaactcatgacaccatgtccagcttttttttttttttttttgagacagagtcttgctctgtcacccaggctggagtgcagtggtgtgatcttggctcactgcaacctctgcctccagggttcaagcaattctcctgcctcagcctcccaaatagctgggattacaggcatgcaccaccatgcccagctaatttttatatttttagtagagatggagtttcaccaggttggtcaggctggtctcgaattcctgatctcggtgatctgacagcctcggcctcccaaagtgctgggattacaggtgtaagccaccatgcccagccaatttttttattttttgtagaaacgaggtctcactatgttacccaggctggtctccaactcctgggctcaggtgatccacccacctccctgccttggtctcccaaagcaccaccatgcctggcccaaaatcttgtaattgcttaatactgtatatacattcttataatgatatgatatttcccatatttgtgtagaagatgcatgtggttcttctccaccccctcaagtacttaaaactatcacattggcagagtacaacctttaaatgtttctggcatcctccctcctcccattaaaaaaaaaattaaaataaaaatatgtatatacacgcccatacacactacaacagagggaaaaaagcaactcattgttcaactggtgttcttataagaatcagttcttaaattccaactgtgtagtaaaaggtaagcaagctataagctaccttttaacctatcctttctctatatacgttccatttacattgtacttgccctccaatctatgcaaacagtcacaaagattagattatgtttgctggcttatcatttcaactagtaacaaattcttaaggtgtgaatacaagatatggagaaaaaatgatgatgcacagctatgctgaaatttcgtattgttcaacttgaaatacgtttacagcctaatgggagtacactagaaaatgtagaaagagagcaggcacggtggctcacacctgtaatcccagcactttgggagacagaggtgaatggatcacaaggtcaggagttcaagaccagcctggccaacaaggtgaaaccccgcctctactaaaaatacaaaaaaaaaaaattacctgggtgtggtggcacatgcctgtaatcccatctactcaggaggctgaggcaggataatccaggtggcggaggttgcagtgagctgagatcgcaccattgcactccagcctgggggacagagcgagactccgtctcaaaaaaaaaaaaaaagaaaagaaaaaaaagaaaatgtagaaagagagccactccactgcagagcaattaattctatctccactaatatttttctaaatattcactgaaacagttttaaaaataatttcctgaactttaaccctcccaacatcttcaaaaggcaaaaattaccccctcagagggacacagctggtagtgccaatacaaaagatctttgtcttcccattcttagtccatagcttttttcatgacaccagcctctcttaagataaatatctgtgaaggatcaactttttaaaatacacacattctagctgggcacggtggctcacatctgtaatcccagaactttgggaggctgaggcggaggtatcacctgaggtcaggagtttgagaccagcctggccaacacggtgaaacccgtctctactaaaaatacaaaaattagccaggcatagtggcatgcacctgtaatcccagctacatgggaggctgaggcaggagaatcgcctgaacccgggaggtggagattgcagtgagccaagatggtgccaactgcactccaggctgggcaacagagcaagatgccgtctcaaaaaaaaaaaatatatatattcttaaaaataaagacacttagagaggaatctaaaacacactggttctatttttaacttcaccaatgctaagacagcgggtgtttttttttttttttttttgaaaaagaaaagggaacaaatttcacataggagaatagtttttgaaatctttgcacaacagggtggccatagtaaataatgattatttatttgcaaagagaagacagagataacaatagcaataataataatgtatttcaaacaattaagagtaaatttcaaatgcctcaccacaaaatataagtaagcaaagtaaggcgatagtatgttaattagtatgatttaatcatactacattacacacatatatataaacattacgttgtaccctatgtgtacaattatgatttctgaattaatattagagtggggagaacaataatgattaatttttacttcttcagtaagattacaatgaaaatgtagagagcactagcattatagtaactatacgataggccactttaaataaatggcatcttttacaaaatttttagtcaataagttgattacgacatacttacgaactatttgctattaagtgtaagttaatttataattttagtattttcaaaaaaggaacatattaaaatcctatcaatatttcaaataatgacaaaattaatcatttttaatagaatccttactcaggtcctccaaaaacaatataaactatgacttaaggtaaattcctttaaatctgactaatgaataaatgttaaatctcaaatttcatagtcccagtgctggaaaatctatatttttatttttcttcacgtttatacaaagaatgtacagacaggcaagaaatgtaatcaacctttttaggaaagaatcccaggatttgttttcttttcaattaaatatatatgaattctgggggatactggtgatcatctctggatctttttactcatctaatgagaaaagagtctcattatacaaagaggatagtcaaaaagcctaatgatttcctcacataagtaggtttttctgtctggcaaatctgaagaagtcaacatagaatctgtcattaatgcattgaatctgaacttccactattcaaatcaaattaggacctggaaataaagtgttaacacttcagacaagaaattccagggtttgtatcatcaggaatataaaccagggacactctcaagaggctgaagagcaagagtcatgcactgcttcagagaattaaatactccaagatgaaagttaaaatttcaaacacacatatcacacatacacatcttttaacatcaggttgaaatgctaaagggaacagagtaaaggtatgtttttaattaataaatttaaatgagagaaaactttaaattcaaagagcttcagtaaaaaaaaaaaagaaaatattagcaatgttatcaaatgtggacgaaaagctaatatatgtcactatgtaatccaagacatattcattagtggcgccttttttctgggctattaatatattagatgccatccaaaaacaaatatctagtaaatattaagtttaacgacttcttaaaaacctgtaggttcccaaagacatatacatgtatgtgcagtgaggccactgctaagcctctaataatattcttgtagactactaaagttctctatgatgataaaaagggtaataaaaaaaaaatctagtgtctccccttaataaacaaagaacgagcataacttaggaagttcggtaacaaaaacaatctataattctggtaccagaaatccctctgaggctgggcgaggtggcttacacctgtaatcccagcactttgggaagccaaggcaggggggatcacctgaggtccgaagatgaagaacatcctggctaacagggtgaaaccctgtctctactaaaaatacaaaaaattagccaggcgagtggcacatgcctgtaatcccacctacttaggaggctgaggcaggagaatcacttgaacccaggaggtagaggttgcgtgagcctagatcgtgcccttgcactccagcctgggcaaaaagagcaaaactccatctcaaaaaaaaaaaaaaagcaacaagtccctctgaaaaaagttttaaataataaacaaaagtctataacaggtttttaaataactataaagtcctacacatattacatgaataccaacataataatatgaatatgaatatcaacagggtatccaattccttttttgaaaaggtctgaaaattaatatgaaagaagtaattctgtatgttcagaaatctgttgattctaggccaggtatgatggctcacacctgtgttatcccagcactttgggatttacaaaatgggatttcctcctcacctaaggtcaggagttcaagaccagcctggccaagatggtgaaaccccatctctactaaaaactacaaaaattagccaggcgtggtggcagtcgcctgtaatcccagctactcaggaggctgaggtaggagaatcacttgaacccgggcggcagagtttgcagtgagccaagatctcaccactgcactccagcctgggtgacaaataaaataaaataaagaaatctgttgattctggaatatttgcgtttcattccccaatcagcaggtatccaattggcaagaagtgtgtttccccaggcattctaatgggatgccagaaggctcaacccagtgcttaaatttttagtgattacattgcttaaataatgtagacagatacaatagattcaagataaatcaatatgtaaaaagactttaaatatgtgcacaaggtatttttcaagatggataaaacatatgaatcttaaattaccatctttttttttttttccctgagacggaggtttttttcctcttgttgcccaggatggagtgcaacaacagcatcatctccactcactgcaacctctgcctcccaagttcaagcaattctcctgcctcagcctcctgaatagctgggactacaggcgtgtgccaccatgcccagctaatttttgtatattttttagtcgagatggggtttcaccatgttggccaggatggtcttgatcccttgacctcatgagccgcccacctcggcctcccaaagtgctgagattacaggtatgagccactgcgcgtggccaaattaccgtattctttcttctgtaaaaagatctggccactccagtccattacgatactgtccttttgagcctgctcaatcagtttgtttaagccctgcctcaggctaacagggctgccataagaggaatgctttccccaaaaacacatcctacaagaacagtgttgtaatctctagagttaacacttaatataaaaacacaaacttgcaggatctcgttttcatgaatttacttgaggaaagacacaaatatagagtggatgctatttattgatgcacttagtaggaaagaaggggatagcaaaagtaacaattttaccagatccatgcacatatgcagattgtattttactagagatggcacacataaaaattccagatagtggtaaggatatgaaaaaaagtggcaggaatgggtgtgatagtgaaaaagtcactgcatatctgtaccttgactgaggtcatggttacacaggtgtatacatttgtcaaaatttactgaatttaagacctatacaggccgggcgtggtggctcacgcctgtaatcccagcactttgggaggctgaggcggatgggtcacctgaggtcaggagttccagaccagcctggccaacatggtgaaaccccatctctactaaaagtacaaaaactagccaggcgtggtggcaggcatctgtaatcacagctactcagggggctgaggcaggagaatctcttgaacccgggaggcggaggttgcggtgagccatgatcgcaccattgcactccagcctgggagataagagcgagacttcacctcaaaagaaaaaaagaaaaaaaaaaaaaccaccaccacctatacatacataaattttatctcaaagaagcaccacaatagaattcaaaaacgaaatcaatttaaaaaggaaaagtacactcgattaatacaagatggaaaagaataacattataaaaccaagtatctctgcatgagcgaactccacaagaatttagtaagttatactctacattaaaaaaaaaacaaaaaacaaaaatacagaataaggaagcatttcctatacatatgaaaccacaaaatttctgtaatctttactgttaggcctctatacaaggggaagtatgtttcattttatagttccaaaaataaaatgggctctgaaaaacttcaagatagtcaaagacaggtaaccaaaatgatgacaatgtgaaaagattaacaaacagctcctctaaatcattaagggtggtccaatgaaaggagcctcagggatttgttttaggtgattaggataaggaacaagagccagataacaaaggcagaaaatcctaaagaatttaacaattcaatgttcccaaaagacaccatggaccacactccattttatatgacacttaaatgacattccatacatgtgtctaacatgaagattgagcagataaaaagtatcactttagtaatcatcctcaatcaacaccagataacaaatgaggggcttttgcttatggaaattctcacatattgagctgaacacttttaccttaattaattaattaatttatttattttttgagacagagtttcgctcctgctgcccaggctggagtgcaatggctcgatctcggctcaccacaacctccgtctcccggattcaagtgattctcctgcctcagcctcccaagtagctgggattacaggcatatgccaccacgcccggctaatttttgtatttttagtagacacggggtttctccacgttggtcaggctggtctctcccgacctcaggtgatccacccaccttggcctcccaaagtgctgggattacaggtgtgagccaccatacacagccttatcttaatttaaattgttaaatataaacataatactcaggtccttagcagccccttctctatattgttccaattaactgcctcccactgcgatctctcttgcacgtgtgtgcacgcactctaacacacacactttttttttttttagacggagtcttgctcttgttgcccaggctggagtgcaacggtgcaatctcagctcaccacaacctcggcctcctaggttccagcaattctcctgcctcagcctcccgagtagctgggaatacaggcatgcaccaccacactcggctaattttgtatttttagtagagacggggtttctccatgttggtcaggctagtctcgaactcccgacctcaggagatccacccacctcagcctcccaaactgctgggattacaggcatgagccaccatggccagcccacacactttttcaagaagcaactagatttaatcttcctaaattgtgccactttccggcaggtaaaatttcaatgattccctaaagtcactccaaatacacttaaactgggccagggtggtggctcacgcctgtaatcccagcactttgggaggccgagatgggtggatcacctgaggtcatgagttcaagacaagcctgaccaacatggtgaaaccccgtctctagtaaatacaaaaaattagccaggtgtggtggtgcgtgcctgtaatccctagagctacttgggaggctgaggaaggagaactgcttgaacccgggaggcggaggttgcagtgagccaaaatggcaccattgtgctccagcctgggcaacaagagcaaaaactctgtctccaaaaacaaacaaacaaacaaacaaaaaaacacctgaactatgattaaaggtctacaatagggttcccaacccagtgcttcagcttcacctcttatttatattactcctcataagtacccaattcctctacacactgacaatttgcacctggccttatcctaattttcttctattttgggggggattctcccccaaattcacagtgaaaactgtacagaccaattccatcaccccattttccctcctctgaccctccaagtttttgtttttgtttttgagacagtctcgctctgtcacccaaattggagtgcaatggcatgatcttggctcactgcaacctccacctcctgggttcaagcgattctcctgcctcagcctcccaagtagctgggattacaggcacccaccactgcatccagctaatttttgtatttttagtagagatggggtttcaccatgttggcctgtaaccccagcactttgggaggtcaaggcgggcagatcacctgaggttaggagtttaagaccagcctggccaacctggcgaaaccctgtcaatcatgccactgcactccagcctaagtgacagagcaagactgtctcaaaaaaaaaagaaaggaaggaaggaaggaaggtatactgagaattacatcacaaaatccacatgctctccccttcacaaagccctttacttttctcccataataacttatagcctccttgaagacagtggttttacaagtcataaaaatcctggccgtggcccagtgcagtagcttgtgcctgtaatcccagcactttgggaggccaagacaggcagatcacttgaggtcagaagttcgagaccagcctggtcgacatggcgaaaccccgtctctactaaaaatacaaaaattacccaggagtagtggcacatgcctgtaatcccagctacttgggaggctgaggcaggagaatcgcttgaacccaggaggccgaggttgcagtaagccaagattgcaccagtgcatttcagcctgggcaatacagtgagaccccatctcaaaaaaaaaaaaaaattatggccgggcacggtggctcacgcctgtaatcccagcactttgggaggccgaggcgggcggatcacaaggtcaggagatcgagaccatcctggctaacacggtgaaaccccatctctactaaaaatacaaaaaattagccaggcgtggtggcgggcacctgcaatcccagctactcgggaggctgaggcaggagaatggagtgaacccaggaggtggagctggcagtgagccgagattgcaccactgcactctagcctgggcaacagagcaacactccatcttaaaaaaaaaaaaaaaaaaaatttatacacacacacacacacacacacacatctccctagaagcatcaatatttactgaattagagtattttattacctgttataaaaaacaaacaaaaaaaccttccattatactaatttataaaggaataaaaacaaaatgggttggggagtccaggcacggtgtctcactcctgtaatcccagcactttgagaagcacaaggtgggaacttgaggtcaggagttcgagaccagcctggccaacatggcgaaacccggtctctaataaaaaattagccaggcctggtgacatgcacctgtagtcccagctactcgggaggcagaggcacgtgaatcacttgaacccaggaggtggaggttgtactgagccaagatcgtgccactgcactccagcctgggagacagagtgaaactatgtctttaaaaaaaaggcggggtgcagtggcacacacctgtaatcccagcactttgggaggccgaggcaggtggatcacctaaggtcaggagttcatgaccagcctaacatggtgaaaccccgtctctactaaatataaaaaaattagccgggtgtggtggcacatgcctgtaatctgatctacttgggaggctgagacaggaaaacagcttgtacctgggaggcggaggatgcagtgagccaagattgcaccattgcgctccagcctggacaacaagagcaaaactccgtctcaaaaaaaaaaaaaaaaaaagttggggtgaggggaaggttcaacttaaagatacgattactaactgtttcataaggaatgacttatttcatactggagtaggagtttgacaccagcatgggcaacatggggaggccccatctctacaaaaaaataaaaataaaaaattagcgtgccaagcatggtgggtcacacctgtaatccttgcactttgggaggccaaggaggaaggatcacttgagcctaggtattcaagaccagtccaggcagcatggcaaaaccccgtctctacagaaaacaacaaaaaaaaagtagctgggggtggtgacatgcacctgtggtcccagctattgggagggtgaggtaggaggacttattgagcctggaagatggaggctgcagtgagctgagatggttccactgcactccaacctgggcactggagtgagactctgtttcagaaaaagagagaggaggccaggcatggtggttcatgcctggaatcccagcactttgggaggccaaagcgggtggatcacctgaggtcagcagttcaagaccagcctggccaacatggtgaaatcccatctccactaaaaacagaaaaattagccgggcatagtggcatgcacctgtattcccagctacttggaaggctgagacaggagaatcacttgaaccaggaggtggaggttgcaagtgagctgagattgtgccactatactccagcctgggcaacaaagtaaaactctgtctcaaaaaaaaaaaaaaaaaagagagagagagagagaggaaaaataaataaattagtcaggtgtggtggtatgcacctgtggtcccagctactcaggaggctaaggcgggaggattcccagagcccaggaagtcaaggctgcagtgagcagtgattgcaccactgcactccagcctgggcaacagagcaagagcatatctcaaaaaagaggaaagaaaagaaaagaaaaacataaaaacaaacgttcctttagttttaatttttattttttagtttattatggccgttttactctcccccaagtaaaacagccatgcacaatttgctgaaattttccttagtgtactttgaaatctgtggaacagaactggcaatcgctaaattctatttgactctagttccatttaatattagactggtgtgaaagtaactgcggtttttgccaaaaccgcaattacttttgcacccacctaataagtataaaatatgtaacttcacttaattttatcctttatgtatttccctatattatgtacctatggacatcaaacttagtacagactgataaaaggctgaacagacaactctggtttcaaaaatccagcttctcacaacatcagacatactagtatacagcttttctaatttcacaacacatttccattttttggtctttcacaatagagaagatgtgtatacttttgaatactctgatctgtctacaatctaccaaaattggaaggtgtttttattatacagtttcatccttttagaaatatacaaagatcctaagtttgggcacagtaagacactcaatatagatctactactaaacaagtaagaccaagtacataattaatgtcctaacacccccagtggagaagtaaaatctacttgttttctgttgacttgaatgccttctcttctttgttgaattaatcaatctacttgactccaatgtcaaattaatcaatgtcactttagaatattaaaatgtacaattatgaattacacatttaaaacacatcattctgatctctgtcttgattgatactagaagattatcttccaaactaaggtggaaaaaatgacagactttagctattggcaatgataggtcatttttttagggaagaggagtaaagagggcaacctccataggtcagatatccctttgttctaagaagccaccacctctgtttcttcatatgaaaaaaaccagaggcatccagtggttcccaaaaccttctcaactttacgcttgaggaacccacagatttcaaataatacaactgacctaagaccactcatttgtttaaccattctttttttaattttttatttttttttttgagaaggagtcttgctctgttgcccaggctggagtgcagtggtgtgatgtcgctcactacaacctccgcctctcaggttcaagtgattctcctgcctcagcctcccgagtaactgggattacaggcatgcaccaccacatcctgctaatttatttatttttttttttttttggagagacgggggtttcaccatgtcggttggctaggctggtctcgaactcctgacctcaggtgatccaccaacctcagcctcccaaagtgctgggattacaggcgtgagccactgcccccagcctgcttaaccattcttaaatgtcgggtgcggtggctcacacctataatctcaacactttgggaggctgaaggtgggcagattgcttgagttcaggggttcaagaccagcctgggcaacgtggtgaaaaccccatctctataaaaaatacaaaaatgagccgggctgttggcaagcgcctgtagccccagctacttgtggatgctgaggcaggaggcttgagcctgggaggtcgagactgcagtaagccaagtatctgtgccgctgcactccagcctgggtgaccacagcaagaccctgtctcaaaaaaattgacagaagagttgactgagagcacagtgaatgaaaaggaagactataagccagtgccatataaatgcttactgttggaggtatgcttctatggaacacgggtttgctctcttgccatatgacattcacgtattcagccacctggaacacttcctgtctgtatgtgtgaagtatcatgtgtggtcaaaattgactcaacagtcattttccacaccaactggcaaactaacactaaaagaaatcaacaagtattgctttttcaaaagcctaaatcggctgagtgcggtgacttacacctgtaatcccagcactttgggaggccaaagcaggcggatcacctgagtcaggagtccaagaacaggccggccaacatggtggaatcccgtctctactaaaaatacaaaaattagctggacgcctgtaatcccagctactcaggaggctgaggcaggagaatttttccctgtaagcgggaggcagaggctgcagtgagtcgagattacaccactgcactccagcctgggagacagagcaagactccatctcaggaagacaaaaaaaaaagcctacatcaaggaaaacagaaccaaaacaccagggacaaaatggtacataagaggcaaaaaaaattttcaccaaaattattcagatgaaccataataaatgtgcctgcatctgaagatgttctaaaccttcatttaagcaagaagcaagatcaagatccgttccgtcagttacctggagtctgtcatctttctgaataggggacagaatcacctcaaatttaactaataaaaatttatgacttggcaaacaccccaggtatttttattgactaacaaatcagctatgacaatcttagcaacaaatcaagttatgctatggggtatgtccacactttcctgttccctctacaacaggagaaaatcaaatctttccaacatcctaacaaactgttactccctgtaaccaaatgtatcacagtatcgtctaccaaggcgttacatcctgaaactttcctacaaaaagcacagcttcaaagaaaccttgcaagctttcttgtaagctcctcccttcccacatcgcccctccccagagccaagaaataaagcacttgaaagaaacaacatggataatatttattaatagcttatgtacatattccataactacataagccatttggcttcatacctgtcagcaatgaagtcagctggccctagcacgtggctgcgactcttctctatttatttagaactacaaactacaatttacactttacaaaagctgtaggactatttgggaaggcactttattcttctaaaaggttactaaattctcttaaatacttatactgatcacaatactgaaaaataatagaaaatccattgtcattcatttaccacctgatttgttagatgccagataatcaaatttcacacatttcaataaaaaggcaaaactaagcatgtcaatcataggaagaaaaatacttaactaattttatttaaagcactcacaaactcttaagtggtacaagacaagtcaacgctgtttatcgaacaatattttttttttacgactaaacatctcaattctagactcaggcactaattattaaagtcatctagttatatacaccaattctcaacagacacagttttttttggaaaggcatattaaacagactaagatgtgtactacccattagccaaagataattttattgatttttctaatgagtcttcaaatgttacattctaacatcttagcaaattatttccaaatactgctggaattacatgtaactatcaggaaacaaaagggcttctcaacaacttgtgcgttctacattatctggccagtttccggacaattataatacaattgtgctccaaagtaggagagttccatgaatcaattgcccctaaaatatatttctgtatatttaaggagttctaagcattgggttaaattccaaacagactctgaatacaagcatttatttagtaagagaggttagaataaatcaatcctaaattaggcacagctgccctccccccattgatcaaaaagacaggaaattacatttatttaaaaagttaatgttcctaatatattcaaatctaactaagccccaaaacggtctgagatcaaatcctccataaaagaggaaattctctagacttctaagtgggtgcccaaagagttcactcaagtgtccaggtatgaattacgattcaccagagtaaccggccttgcacttagggaaaacttccatcgcccaagaccagagtgggtcgatcccatcaacagtcacacaatctcatctcatgctccactaatgaatgttctgcctaaagtcagagcaatgccttggctggagttttgttttggttttttcaatattaccacgtgggggtcacagaaagggaacagaggttacaagagctctcacgtggcggctgaaagactggggaaccgagaaagtgaatgagtaacagggagggtcctggactctcaggatctcccaactcggggtcagggggaggcggtaagtggaatgcccccccaccacccccgcctctttctcacctcctggtcccgaccctaggccagtgccaccgccgggagccccgggtctcggcttcagccccaggctgaacatgcagggaggggagaggcacttaggcctcgcctccccgtggccttcctcccccagccggggcggaggagaaccaggaagccgcgcccggctccggtgggtggagggcctaggccgcgcctcccagccccgcggccctaggcctcggcccgcccgaggcggagcccgggaggtcggggcggggtcccgggccggtcacccacctgggttgccagtcattccagctccgcgaatagttggtgccgccgctgctcagccgagaccccggggctctgcggctcattaccttccccgacacgacatggccaagcgccgccgcccagagaagcgcgagtcgccgcccgaaccggccgctgccgacaccccgctccggcccggggctgaggaggaagccgaggaggaggaagagaaggaggaggaggaggaggaggaggaggaggcggcggcggagggcggggtaagaggacggccgttccgggttccgcctgagcccgcaacgcagaatgaggaggcgggagcggcgcggtgagagagaggcggatgaaggggcgccgacttctcttccagggccatgcgcggcccacgacgccggggccccggaggacgaggacgacgaggagcaggcggtggcggcagctccccacgctcacaaggccactgcttccccgcctcccggctccgcccgccgcgccgccactgtcgcacggcatgctgggagcgagaggcggggtcggccccgccgggcctggggagagaggcgggtcctgtcggcggggcggggccgagagaggcggggccgatagcaggccgccccgccccccacggccccaggctcttggacggcgaagaggtctgggcgtagtagtgacgaatcctaagacaagggatctccactactgcggccacacacttttctcccaaacgcttcccggaaagcaccggagggctgggcagtcaggtgtaaacaggcgtccaatcaaggacctgcagtgtgggtggtgggggctggtgccctggggtgcgagcgcacacaggcgtgcccttggtttcacgtgcgccagttttcccactttctacgggggggagtggaaagtgaaaatagtaagatcgagaggtggatatccaccttcccaacctccacctgaaatgtgcccatcgagtcctagcaccttttaccatttcttcccaatgaaaaaaactaaacgatgtaagggaagggagtacccacgaccaccaaaccctgtcctctgcaatgtgaaatgtgctttgaagtcctctcaccctgaggcttgcccgccttctgctggtgaaagaagctgggggctaggcgcggtgggtcacgcctgtaatcccagcactttgggaggccgaggtgggcggatcatctgaggtgaggagttccagaccagcctggccaacatggagaaaccccgcctctactaaaaatacaaaaattagccgggcatggtggaggacgcctgtaatcccagctacttgggaggctgaggcaggggaatcgcttgaacccagtaggccggggttgcagtgagccgagatcagaccattgcagtccagcctggacaacaagagtgaaactctgtctcaaaaaaataaaagagagagagagaaagcagggagggaagaaaaaggaaggaaggaaaggagggagggagggaaggagggaggaaggaaggaaaggagggaggaaggaaggaaggaaaggagggaggaaaggaaaggaaaggagaaaagaaagagaaggccgggcgcggtagatcacgcctgtaatcccagcactttgggaggccgaggcgggcagatctcgaggtcaggagatcgagaccatcctggctaacacggtgaaaccccgtctctactaaaaaatacaaaaaattagctgggcgtggtggcgggcgcctgtagtcccagctactccggaggctgaggcaggagaatagcgtgaacccgggaggcggagctcccagtgagcagagatcgctccactgcactccagcctgggcgacagagcaagactccgtctccaaaaaaaaaaaaaaaaaaaaaaagagaatcagctgggtagaggagacgtacctgaccatctaccccatgacatgtcccatgccccagggaaaaaaattccctaaaccatctgatgcataaagtgaatgcatacacattttttaaaaggtgggccaggatgctccttaaacaagtgtctaaaccttatctgcataaggagtcttaacctatcattttatgttgcaaagaaaacgtctttatatatcgcttgtgcaattaaaaattgtaaccaaaagtacttgaagattatgaggagttgacacctccacacacatgcatatcccctccaccttgggctccttgcttatggccaccaatccctcactaagggaggatcctgccagttctaaatgatggggactacaaaaattacccggcgtggtagcgcgtgcctgtggtcccaggaactcaggagggtgaggcaggaggatgacttgagtccagcaggtggaggctgcagtgacctatgatcccaccactgcactccagcctgggctgcggagggtagggagggagggaggagaagaaagagaaaaggcagggcaccatggatggctgactcctgtaatcccagcactttgggaggccgaggtgggtggatcacttgaggtcaagagaccagcctgacaaacatggtgaaaccccgtttctacaaaaaaatacaaaaattagccaggcatggtggcgcacacctgtagtcccagctatttggggaagctgaggcatgaggattgcttgaacccgggagccagaggttgcagtgagccgagatcgtgccactgaactccagcctgggtgacagagcaagactgtctcaaaaaaaaaaaaatcatttaggtgaagtgattcatgcctgtaattacagtgatgggaggctgagactggaagatccttgagcctgggagttataggccagcctgagcaacatagtgagacccccatctctacaaaaaaaaattaaatttttttttttcagacggagtttcactcttgtggcccaggctggagtgcaatggtgtgatctcagctcactgcaacctctgccttccaggttcaagtgagtctcctgcctcagcctcccaagtagctgagattacaggcacatgccaccatgcctggctaattttgtataaaaatttaaaaaattttaaaattagacaagttagaaattgcttgagcaactggacacaatctctggtactacctttctttttcttttttatttttttattttattattattatttcttgagaaggagtctcgctctgtcgcccaggctagagtgcagtggcgcaatcttggctcactgcaagctctgcctcccgggttcaagccattctcccgcctcagcctcccgagtagctgggattacaggcgcccgccaccaagcccggctaattttgttttttgtatttttagtggagacagggtttcaccgtgttagccaggatggtctcaatctcctgacctcgtgatccacccgcctcggcctcccaaagtgatgggattacaggcgtgagccaccgcgcctggccctctttttctttattggtcaaaatattatccaactaggcatatggatgtggaggcatgcctgtgatcccaattacttgggaggctgaggtgggagaatcgcttgagcccacgagtttcaggctgtggtgagccataatggtgccgctgcactccagcctgggcaacaggatgagaccatttcttaaggggacggaaaaaatcactctggctgtggcagatttccttaggatagattccgagaagtggagttattggggaaaaggctgttaatgattttaagtctttggatacagactgttaagttgctttccaggaagtttctgccaatgatagtctgatactttctgtgtcctcacaccaccctttgtcaacactgagtgttttttgagggttaattatttctatgggagaagttaaaaaaaaaaaaaagacaacaaagaaattgcttcaggtggggcatgctggctcacgcctgtaatcccagcactttgggaggctgagatgagagaatcacttaagcctaggaggtggaggttgcagtgagcctagatcgtgccactacactccagcctgggcaacagagtgagactccatttcaataaaattaatcaaatgaatcaaacgtgagcaactctcataacttccaacatttttttcttcttcctgttggtggttctgcctctctggctccattaggatttccctactccatttcagtcatgggaaccgagtttctgttcctgaaacacaccaagcctttctggcctctggatttttgtacttgctgttcccgccatctggaatgccttccctgcatttgttcccatcagggttgggactagcaaagtgacaggggatggagttgctgagggtgcaaaatttaaggaggcacctactcccagggtcatgcaaaagccaactttgcatttgcacaatcctgtgagtgagtccctccttaaatttgaggctgtactgtaatcccagctactcaggaagctggggcaggagaattgcttgaacctgggaggcagaggttgcagtgggccgagatcctgcctttgcactccagcctgggcaacagggcgagaatccgtctaaaaaaatgaggctctagacaccacatttgccctactctggcccctgccctgattttcctggcctgtctcatctccagacaggtttgctttgacctccctgcccataaaagttggccagtgccctttccaggtactctgtcatataccctatttctttccttggtagtacccagcaccatctgcaagtattgggtttctttgcacatttagcatctgtccaacccttaggatatcagctttgcaagagcaaaggtcacgtctatctcagcctacctcctccatactcagcacacagcacagcacctgaccataggaagcacgcaagaaatgggaggaatgaaatggaaattatctaaaataaggatcaagattgatacagaagtattcatctcagctttacttattaatagcaaaacaaaaacaaaacacctggatattatactaattctcaacaataggaaactgattaggatgcagtacattcagagctgaaattttctgcagccattacaaattacatttgtgaagatttttttttttttttttttttttttttttgagacggagttctgctcttgttgcccaggctggagggcaatgtctcgatctcggctcactgcaccctccgcctcctgggttcaagcaattggtctgtcattttcagacccaacagaaacagaggtgctcctgccaggcccccggggactgcctccaggagtcatttgtaatgacagggtgcgttctgcgcacagtttcagagtctgtccaaagggccaatgctggggctgggcagaaacgatccaaggcctgtgagctgtgcagctttataggcaaatgaagatcgtttacccagaattgcctgctggagacagcatagaggaagtggcggcaacttcaccagttccaggaagcccaggcagcctggtcccccagggtgcacctggcacagcagttcgcatggggccagagagcggcagctgaccgctgcaactacagctggcctgacaccgggcacaggtaccagcccagcccagtcccgcccagcgcagcctgcggcccctagccgaaccagcacctggcaaacctgacacccagccttggagcttgggcccccctctgcagctggctggggctcctgagacagcttctttgtcggaatccactcagtacacacacggtcccaaacttagtggctgcccagtgaacatggggcttagtagaaccagtaccttcctccctggccccttcaagtctaaatatcccctgctctgagtacaagcctccaccttctccactgatagacagcccccaccatctccaccgacagacagcccccaccttctccaccgacagacagcccccgccatcttcaccgacagacagcccccaccatctccaccggcagacagcccccaccatctccactgacagacagcccccaccttctccaccgacagacagcccccaccatcttcaccgacagacagcccccaccatctccaccaatagacagcgcccaccttctccactgatagacagcccccaccatctcccgtgtcatcccctggggggacttgtaaaagcagtggtcggggagcgggatggaaacccagagcttctgatcaggcaggtcgggggagagggagacaacacatctgcacagaacaaggtcccagggaggccggcgctgctggtccagggagcaccccccagcacaggcgcgtgcttccctgatggacacgtcaccacccctgggctccagaaaatgaatgtctgacccagtgacccctgtcctcacccaaggccaacctcaccccagaatgggctggaatgctgagcctgcccatgccagctccagatccacccacctccccaccattgctggccacagagagaggtcaaagtggtccagaaaccccaaggaaaatgaagcagttccggggcagggaagcaaaggcagtgtttccattttttttttttttttttttttttttttttgagacaaagtctcgctcttgtcgcccaggctggagtgcaatggtgcgatcttggctcactgcaacctccacctcctgagttcaagccattctctcacctctacctcccgagtagctgcagcctctgcctccggggatcaagtgattctcctgccccctgcctcagcctcctgcctcagtagctgggattaccgacacctgccaccacgcccgcctaatttttgtatttttagtagagacaagggttcaccatgttggccgggctggtctcgaactcctgacctcaggcgatccgccaaccttggcctcccgaagtgttgggattacaggcgtgagccaccgtgcctggccaggatggtctgcttataatggctcaattttgatgtccagtctctgcagagcacaaggcccccgctttgggccagacatacagatgtccctgggcaagaacagagatgatcccaaggccctggccccacctgtctgctcagtgttgaatcaggtttctgtgaaaacaaattactaacaggctggtgtcacattttcaaattctgtcaccagccgttgaacacatgtctttgtacttttttccatttttaaccggggctgagttacgcccaaccacactgtcctggctggcacgggggaggaggtgtcagctgctgtccagaatggggctgacacattcattttaaacaggccaggaagatgcagatttggcaagctctgaaatttgccgacaccccaagtcaagggtaagcaggagaaccggaaaagggcagcttctcatgtagtcaggttctcctgatgcaagcgtcctggtggatttgggtttcccaagggtcctgactccaggagacccccaggaccgacaggaagggccacccctccctctgaaactctgaagccaggccacccagtgctgaaatgctgtgtgaactcgggcaagttcctttgcagggactgagcctccctttcatgtctccaacagactggaacactgcctcccgttgcatgggcgaaatacctcgcggacatgtcttacggcgccccatgaaagcatcaccattaatctgaccagtcactgcagcatgagtatcttcagggcacagatgaagccatgggcaccagtgataaggagttgccactgctggctaagtgcggagcctcacacatctgtggcccagaaacccataccccactccaaaccctctatagctccaacagttatgctaacaagaaaaaggagtgaaaacccgctccagtcacggtattgtggaggtggaaggacacttgtggcagccaatccaacacctccattttatagctggggtaaacatagttcagagaggttgtcccacttgctgaaagtcacacagcagttcctgggcggcaaagtgaggacatccaggtctcctaaatctcaccctcgtgctctgcccacttaactaggcttttcaatcctggctgtcaaagagaagcaccaagtccacttgggctcctggccagcatccaggccagtccaactcaacagcaagcggaagcaaataccacacaatgaacttgttgaacagactctgtgctcaggcttaaccagtgcacagcctgtacacccgacaggcggatgcagctgttccaaactaaggccagggcctctccccaatcccgatgggctctgcaggtgcagtgatggaagaatccctggtgacggggagcccttagctctgagcaggacctgaagccatctcagggcttgcaccggtccagatgctgctgcacaagtgctccaggggctcctgccctgccctcctcacttgccccctcacctgtcagggatgtttgattcctggctggcccctcccctacctgacccctgccaaagacctacgccaccccaggctcccagctctgaagcaaacaaccagagaagtcaagcgcctggctccgggccacacagcttgagggactcagagctccagggacagtgcccgggccctgctcaggccttctgcagaggctctgggctcttccagttgactcagctcacagggcccctacacagtaccaggtgaagacacagccccaagaaccctcagggtctgaagccacacatgtgagccgtgggcagaatcctgcattggcctccagcagctcgagagcacagggacaaagctggactggccccggggtcaccgtggccttggttttgtagcagctgcagtttgagcacgtacaccaaaaataaaattctaagccccgtaactgactgaagggaccactcctattggccaaagggatattccaaagttaacctgaaaaacgagctcaggtcatgatgggaagaggggtcacacaggccttgttataccccctccctctggaattcaggtacagctgaccagcactaacattcaaacacagatcttggcctggctcagtgactcatgcctgtaatcccagcactttgggaggctgaggtgggcagatcatgaggtcaggagttcgagaccagcccgaccaacatggagaaaccccatctctactaaaaatacaaaattagccaggcatggtggcggcaggcacctgcaatcccagctacttgggaggctgaggcaggagaatctcttgaacccggttgcagtgagccgagatcatgccactgcactccagcctgggtgacaaaaacaaaacaaaacaaaacacaatattggtctccacaacctcctgtcttacccagatactcctttctattgattccaggtctttagctaataactctttcaaccaattgtgaatcagaaaatattttgccaggcacggtggctcatgcctgtaatcccagcactttgggaagccaaggtgggtggatcacctgagatcaggagttcaaaaccagcctgaccaacatggtgaaacccccgtctctactaaaaacacaaaattagctgggcatggtggtgcatgcctgtagtcccagctactcaggaagctaaggcaggagaatcacttgaacccaggaggcggaggttgcaatgaactgagatcatgccactgcactccagcctgagtaacaaaagcatctcaaaaaaaaaaatatatatatatgtatatatatgtgtatatatatgtatatgtgtatatatatgtgtatatatgtgtatatatatgtgtgtatacatatatatatatatataaaaagaaaaaagaaatctttgaacccacttgtgaccaggaagcccatccctgccttggagttgtcccgcctttcttggcagaaccaacaaatacctttcatgtactgactgatgtctgcctgtaacttctgtccttgtacaaggtatgaactccagctgtggcccagcccctggggcacatgtcctcagggcctccaggccttggtcctcacatttgactccggataaacctcttcaaatattttacagactctggctttctcgttaacaagcagctcacacatatagtgtctcagcagtgacagatgctggcccaccccgaggtcaggatgactcagcagggattgagtttgcgggcgtcatgctccaaggcccggaataggaggttggtgctcattcctcacatagtgggcaaatcctagggcaggggagggggggcaatgccagagaatggtccccacctggggcggtctgacggccagagatgcagagaaagagacgcctcccacgctcctggagggcaggtgctgtggccaccccggagggtccgccttccagagggagagttcaggatttggccacaatcagggaaggaggcactgggggggggccctcctgttggaaaagggcagcggcaggaagggggtgctgccacagggcctctggggagcgcgcgggcacacagtaccaatctgcgtgcatacacatgccctgtccctgcagatgggccacgcaaggcctgcccatggccagccatccaggtgatgctccagggagggccaggcctacttgggggcagaaccctgtggctgtccaggatacctggatgtgagtctgggaaggatggagaagggtggaggagtgcgaagggcccctaggggttgctggggaacacagatgagcctctgacccacctgtgtccttacctgggccgactgggccacccagtcttgctgacacctccccagacccctggcacccaccagactccccaggcgtggctgtgtgctccgctatgcctgatgacaaacagtggcctcagtgtagaggtgggcactgtggcccctggctcctggctcgctcctgcctcagtttccccagctctaaattggggattatcactggcttcaaaggctggagtggaaagtggtggccaagaggtgccaagaggtggtgcaagcatgtgccctaccttggacacccctctacagggggtggctctcaccctggcctgggccctcgggggtctgcgcagcccactcttctgtgtgaaggcggctggtacactttcctgggcaagattctgcacattctgctggattatgaaagaggtctgtgacccaagaaaaaagggtcagaagtgcccgttaggctctcctgtgtggctcaggtcatgtgcttctgtgaactccccctacggccttgccccgaatcccgtgatgcagcgtgacctgcccaggcgccggcggcactttcatgtctggctgggaaagtcggatttcagcactaatcactggctgccgcctgcaatgagcccacggcttgagctctggggcccacccagctccttaaacatgcagaacctttgctagctgagccagggtcccagctgtgcggggttggggatggaggggtgcagggatcccaaaacccaacccggggccaggttttacacaggcctggactgagaagtggggctacaggctacaggtgcttgataccctgggggggccctggaacaggcctggactgagaagcggggctacaggttacaggtgctggataccccaggggggtgctggacaccccaggggggcagatagaggcagccaggcagcctgaagaccctggggcaaaacacacacaggccccctctgctctctggtcactgctaactggccaactggcctttgagtccactgaccacagctaagcccacagccatcaaaacccaccccttacacccttcaccctttagggaggggctcagagacagttgtggcgattcctacttccacccacagccccccgaccctgggcctgtgccgagtgtgggtgggtgacatcatctcgcacccagagctccagactaaaggaaaccctggctcctgtctctggctcttccctccctctctttgttcccttgctccttccttctttttgccaaaggagaagatagtgaggctgagggctgctcaacgtgcacagtgagcaggagatacaagcatgtggagggacggtcacagcccatgcaactggcaccttcacacgcggaggcctgcgattcccagacacctggcgctggggcaaatcccattccacagccagaaacaggctcggcggggccaggtggatttctcaaagccttggttgcttttggcctgatgctagctggacaatgtctcagctcacaggttcctaaacgcacacccgcccacaccaatctgctgaggagtgacagccatggggaggagacccacctcactccagggaccctggcaccgtctcccatgaggccaggtgtcctcagccacccgcagccagagtcccgcgagaccgacggacggcctgcccctgcgtgacggcacgcctgggactgtcccagcaggctcccatgcttcacccaactgcgacagggaaacaggagggggctacttctgctttcaaggcatggaggagctgtctgcaggccacttcccgaacacctatgcgcttggggaactgactgagactgagccggggtatcttctccacgatgcggtgagcccatcaggcccttcttctgagagcacctccctggaggtggaagcccctgaggcccacagcatcttctgaacctgtgagctcccacttatttactgagagctcacctgggccagtgccggtccacggctgtggccgggactttgagtagatgctaccctacttgctatgcagagccagctggggcccagggaggtcagataactgcccaaaccaaatccaggcccagccagaatctcaactccagcctttgcgccttctgataaaacccagcatcgcttgaatttccagtacacgctgccaagtcttcgttaagcaataaataacccacacaaccctactgtcatgacaagttccatatggccatccagaaagagacacatagagctggttcctctcacctttatgaccagtgaaaagcgcaccaacacgaagacacgcgtgaaaggacctcatctcctaaccagactgacaagcaagggattttttccactcaccgtcagtgggatggttctaagcaccgaggccaacccatttcacacgattatttcacaaaaagaaactttctgtgggacgtgcctgggctactgaaaagacagccagcaaaactgagaaccttgttctcaaatccgtaccctctcccaaagcagcctcagaggcccgagggctgaggatccagacccgaaagccactgtaccttctgtaggatcaggctcaaggactaagggggtaaaaggtgccctttcccttcctaagcagaaaattctggaacccaaccttacgtgtgatcatttaaaaaaaaaaaaaaatcagctgggtacactggctcacacctgtaatcccagcactttgggaggccgaggtgggcggatcacctgaggtcaggagttcgagaccagtctggccaacatggagaaaccctgtctctactaaaaaatgcaaaattaaccaggcatggtggtgcatgcctgtaatcccagctactcgggaggctgaggcaggagagtcgcttgaacccgggaggcagagtttgcagtgagccgagatcatgccattgcactccagcctgggcaaaaagagcgaaattccgtctcaaaataaataaataaataaataaataaataaataaataaataaataaaatcactttctatggcttttcactgctccaggaacaatgtccacagataaaacgcccagcctctccttcacaccctggagcgcccatcctgcccactggtccgggctccaggctgccccctgcacctgtcagaagtccccctacaagggcagggtctcccttcctgggacatccactgcccttctccgagctgaagtcagaacgacctgagaatcagcttggagttctaccagcctcagccaagcccacctctgcgacagcactcctttcgagggggcaccagctgcagggagtctgtcccttacagacccgtgaccccgtgacagatgaataaagtacagacacacagatattctgctctgccagtccagctgagggtcccagccgcttataggctccctgctgagtcctgtaaacagttgctacttggccctgatcagctagtcagacgcgcatttattcagtatgattaattaacaaaagcttgagtcaacaccattagagtgtaacagacattgtggacttcccgagtaaaaagcatttaagcacccagggtcttaagattatatgagtaaacaagctagctaggtaaactactctgcctttcttttatttctatgtttatttgtttaactaaaggtaaagggatcaggccgccttcagccagagctaattaccaaagttatgccaacttctcggccttccaagatttgtgtctatttctataactatctctaatatctttcccaccagaatgattgaaccccaacacacctccgtctctcagcagggtctgcctgttcagagaacacaacttctccttcttgccttacacacaggggcaagaataggttcacccttgcagagagcacatccctttctgttactgaaaatcactttccaaaaaaaaaaaaaaaaaaagcaacacatacacacatactcaccacatacacaggtgggtcagagaaaaaaaacaagtacaaatggcttagggacatgagaagtgtggccctaactttcgctgaaagggatcctattaacattaaccctcacctctgggtcagagagggttggcactctacagcctgccttgaggctttacctactgggaccaaaaggactgctggaaagctattttaggccgggtgcggtggctcaagcctgtaatcccagcactttgggaggcagaggcgggtggatcacctgaggtcaggagttcaagacaagcctggccaacatggtgaagccctgtctctgctaaaaatacaaaaaattagctgggcatggtgggcacctgtagtcccagctactcgggaggctgaggcaggagagtcgcttgaacccgggaggtggaggttgtagtgagccgagatcacgccattgtactccagcctgggtaagagcaaaactccatctcaaacataaaataaaataaaaataaataaataaaaatactttttaaagccctattaccacaaaataaatccaggaacgtgtgacttggtacagcctctttggaaggcacattagctattacattagaatccacaccccgccgggtgcgatggctcatgcctgtaatcctagcaaattgggaggctgaggcacatgcccgtaatcctgcacaggcaggagaattgcttaaaaccaggaagcagaggttgcagtgagcaacgagcctgggcgacagagacagactctgtctcaaaacaaaaacaaaaacaaaaaacaaaaaaccacataaccttttcccatttgcacaaagctgggaaaccccaaatgccctccacaggggtctacggggggtcagggggtgggggcggtgagcacacttgttcctgccgacacagggaagtcttcttagcagctaaagagggcagcctctgcgtaccgcctgggaacatggcaaaaccattttaggcttaaaaaaaaggtggagaacaagttgtacattatgatcttttaaataaataggccagcgatatatttgtaacagaagcagctctggaagcgtacactgtcagccacagaaactctggggctggggggtggtaaaggaggagaaatgtgtcacccaggcaggagcttagtggcaccatcttggctcccgagttcaagcagttctcctgcctcagcctccgagtagctgggactacaggtgtgcgccgtcacgcccagctgatttttgcttttttttttgagacagagtttcgccttgttgcccaagctggagtgcagtggtgcgatctcagctcactgcaacctccacctcctgggttctagtgattctcctgcctcagcctcccgagtagctgggattacaggtatctgccaccacacctggctaattttttgtatttttagtagagatggggtttcaccatgttggccaggctggtctcgaactcctgacttcaggtgatccgcctgcctcggcctcccaaagtgctgggattacaggcatgagccacagtgcctggctggtttgaatttttaaatgatgatgaattcatgtatgactgatgtgatttttattagaaagagaaaactaggcagcgccccatcctatgtctccttcctggtggccaatgaagcatttcccacaactcactcctggcaccaacaggaagtcagacactcagcacccaggggctgctttttttttttttttttttttctttgagacaggcttgctctgtcacccaggctggagtgcagtggcaggatctcaactcactgcaacctccacgtcccggagcatgcctcagactcataagtagctgggattacaggcgtgagccactatgctcagctaatttttgtatttttagtagagatggggtttcaccatgttggtcaggctggtctcggactcctgacctcggtagatctgcccatcttggcctcccatagtgctgggattataggcgtgggccatcacacccagccaacagggatccattttttaaaggtaagagtgcaggctgcataagctattatccatgtcgttacataccaggcggacatgtacctaggcgggagggagactgaaccagtgaaattctaatgacaaaaaaaagaaatcagagtcatcccttacattcacatgtccaacgcccagctggaagccacaggctctccccactcctgtcctactacgatttttcccggctttgacctgcatggtggtgcggctgctccgctcagagcctcagagaaaccacacagagccctgctgagtcttgccctcggggcattctcacatttatgaagaaatgcctccccctcccccttctccccaaagtacggtgtggcagaaaacagcgccaacaggtcctgccagtcagaagccactcccctgatttcatggctcaagaccccaactgtaaattagcccttcccaccttgaatatgtacacacactactgagatccaggccgatccttgccatgggatgaacctgagaattgccaagacccgccttcccacgccacccaaccaaatcatgtggtatctggtacaagtgattttccccctgaaatcccacaagaaaactattttgaggccgggcacggcggctcacgcctgtaatcccagcactttgggaggccgagccgggcggatcacaaggtcaggagatcgagaccatcctggctaacacggtgaaaccccatctctactaaaaatataaaaaaaattagccgggcgtagtggcgggcgcctgtagccccagctactcggaaggctgaggcaggagaatggcgtgaacccgggaggcggggcttgcagtgagccgagatcgcgccactgcactccagccagggcgacagagcaagactccatctcaaaaaaaaaaaaaaaagaaaagaaaagaaaactattttgaaaagcagttctctctggcctggtgaagaacacaccagcaccatgcccaccaaaacaggagccccatggctgtttcccagagtaacctgggacccgcacgtccattcactgcaacacagactgaatctgcagccaagctccgctctctcactactgggcaaccctcaggggggatcccttagcctaaaccagcaccagtcactacccgcacacgattttattactactgttttcttatgagtcagcccgtgtcactgattcctgacgagctggtgtggagagcagaaatgaataattttcttttcaactgcaatttccttttcaacaaccagtcagcaatcggagctttaacaataaaccggttgctcagttactccacgtgggtgccacgcaagaggctgggagtattgctcagcggggccaacgggaggctggcacttgcctgaaccgcttaagtgggggaatgaaatgcccaccgaagggcagggcagggaccctgctgtcccgtcactgaagatattcccagcccgtggggagaagtgtaaacgaatgaatgaaagaaacgcacgtggtttctgggaccaatgaccttagcctagaactgccgggacggtccaggaacgcaaaaatgtagagatgtgggagccaggggcgtagtgatgcaaggatgcagggacccagggaccacgacctcccaacccccggcccgcgccccgtactcacgcacgcagtggcaggccatgagcttggctgcctcctcgggcaccgggcagctggggaagagcggcttgagcaggtaggtggcgaagaccagggccacgatgtactgcgatgaaggccggatgacgagcagctcgatccagagcttgaggaaggcgggcagcgagccgtagacgtccagcatgtaggcgtagtcgccgcccgatttggagatggtggtgcccagctccgcgtagcagagcgcgcccacgatggagaagacgccgcacgcggcccacatcaccagcgccagccccggcgagcctgcctccttaagcacgcccgtgggcgtcacgaagatgcccgagccgatgatggcgcccacgatgatggccacgccgttgagtagcgtgatgttccgctgcagggtcacgccctcgccctcgcctgccggcgccgcgccgtccgcgcgcttggaggccagcatcttctcccgcgcctcttccttctcctcggccaccggggccgctagcgcccgccgcttcgggcccgcacccgccatgctctgcttaccggccgggcctgggacacccgagagccgcagccgagcgaggattgtgcgcgccgctcgccgcccgcagctgcgtcaagaaccccgcccgcgccgccttttaggccccggcccgctggccccgcccaccgtccgcggctcctccccgccccgtggcccggccgcggctctcagccccgccccctcgacccagctcggagcacgtgcgtcctccggcctagcctggcaggcgattcccaggcccgcgtggtcctcgaaggcccccgtcctcctgcgccatggagaccccggcctcgcgacctacccccccggcgcccgcgtcatcccaccccgtcctcccgggtgcgcctgggcggggcctggcagtcagggcgagccccttcacccactggcccgcagcctctcgtcaagcctgggagcgggcagtgcaccagggctggcctgaggccaaggatggggtttggggtaccccccgaagggaacctaggctcctgtcccggatgggcctaggggatggaaccgcccccacaaccagctcctggggcacgggggagggatgagaggatgacctgaggggaagctcctgcagcctccttccagcctgggggctgcatcaatgtggctggtgagccgcgaactgagacgagggaagaaccgaaccgaggccacccagtaattcccattgtatcccaaaagaatcttgccaaagatggcgatccggtgcccgtagctttgagaagcagtaataacacaggctttgggaagccagcaatctgcctgagctcaatttaatcaacagaaccgggggttcaccgggagccataagacccccacccccaaatctagctggggaattcaaaggcaggcttcagtgtgaaggggctttaaagcttgttattcctggggaatgcgagaggcatcttagctaaaaagggttgagaggtaatttcagttagaggcgagagcaggatgccaaggctcctaggcctggaaacgggaaggaatataaatactgccccgagattgaccagactggtgagcagccaaagacctcttcaaagggtgtgtgtgggtcagggaggaagctcctcggtatcacccccacccggggttccttggcgtgtgtcctaacgagtccttggaagctcacagcaggcatgtggggaggcctttgttctgggtgagcgttcagcctcccagggcaaacacgcaaacaccggttgcagagctgggtgttcacagcaagacagtctgctgggcagatgcctctggaatccacagaatcctgaacaatagccgtggtggagggggggtcagaatccctgtcatgctgggacctctagctgcagccaggaatgtccaggccccaccccggggaggaggcggctgaggaatgccacggcttgtcattctggaccttgctcgccccccggtatggcgggcattcctctgcagtgataaaaccaagcgaaatctcagcagcccaggcagccaccggcaggggagtgcggaggtcacacagatactaacttgtaatctgccgtccacgctgctggctgtggaaggtgcagagagccctccatccgccctattcttcccgctgtgcctgcagagggaaggagacagtaccaccatggctgggcaaactcaccgagtgctcactgagtcctcccctagatagcttcttgtgcaatagggtaggtgccagttaggagcaaggttagagattgtagggccagattttttgcttaggttcaactacgcaaaataaaaatagactttgcatgcatttcaggcactgggctgacgaccggccaccagggaggctccgccccacttcttagctttggccccaacgttagtcttgttgctgctctcaggcgtgctctgcgtgtgaaagatgacttggaggctgggcgcggtggctcacgcctgtaatgccagccctttgggagaccaaggtgggaaaatctcttgagcccaggagttcaagaccagcctgggcaacatagggagaccccgtctctacaaaaaatacaaaaactagcccagcgtggtggtggtgcacctgtagtcccagctgctggggaggctgaggtagaaggatcacctgagctggggaaggttgaggctgcagtgagctgagatcacaccactgcactccagcctgggtgacaaagcaagactccatctcaaaaacaaaacaaaacaaaaaataacaaaaaaaaagagggtgaaaggcagccccagagtgggagaagagatttgtaaaatggacaaaggccttataattggaatatataaagaactcctaaaaatcactaagaaaaccacagacagcccaagagaaaaatgggcaaatggctcaagtaggtgtctggtgaaagaggatatgcagatggccaatgaatctgcacaaagtgctccacatcattaatcattagggaagtgcaaattaaatccacaggagacacctgggcacaccctccagaaagcacacaatgacctgctggcaaggacaggaacgaccactttggaaaactctttggcagcacagccaaactgagcctttccactcgaaaatgccctttgctcagaacccagcagcagctccaaagtctccacccagcctatcgggccccagtacccacccttgcctcccatgcctctctcctcacccctgcacttggctgcctcaccctcgggctgcaccttgaacaccagaagggcgctcctgcctccagcctctgcctggaattctctgccctcgggtagccatgtggttcactcctcctttggtctctgcccaaatggcccctgtagaagagacctccccacccagccatgtcctctccctgtgacttaccaccccagactttctgtgttgatgcatcgtggtctacctccttccgtcagaacgtgagctccgaggcaaaggctcttcagacctgaaacagtctaggctctgtccccagagtctagaatagagcctgccatgtaattggcactcaataaatgttacatgaattaatggaaaccatcctggcacgagtggtagctctctttccaccaaaagaatgagcttgccaagagagagagacaacatcacgaaagagagacagaaaagccacactcagacccaactttgagttctggatcaagtctttttttttttttttttttttgagacaaagtttcgctcttgtttcccaggctggaatgcaatggcgcgatctcggctcactacaacctctgcctcgcgggttcaagcaattctcctgcctcagcctcccgagtagccgggattacaggcatgcaccaccaagctcggctaattttgtatttttagtagagatggggtttctccatgttggtcaggctagtctggaacttggcctcccaaagtgctgggtttacaggcgtgagccacagcgcctggctcctatgttattttttaggagctttattgttttacctttcctatttagatctatagtctgtcaggaattaatttttgtgtgtgctgtgaggtaggggtgtgaggtatggtgagaaaaaagattcatggttccccatttggatatcccgttggctcggtggggtggctcatgcctgtaatcccagcactttgggaggtcaaagcaggagaactattggagctcaggggttcaggaccaacctgggcaacataatgagaccctgtggatcaacagatgaattgatcgatcaatcaatacgtagatagataagtatccaaatgatccaaaactattcacagaaaagcccaaccattccctacagcatgactcagggatcacaaatgtgtggaaccttctagacatgctattctttttcattggttgatttgtccttctctgacaggtaccacattatcttaattaatatagctttttatttttatttatttattttagatggagtctcactctgtcgcccaggctggagtgcagtggcgtgatctcagctcactgcaagttctgcctcccggattcaagcgattctcctgcctcagtctcctgagtagctgggattacaggcatgagccaccgcacctagctaatttttgtatttttagcagagacagggtttcgccatgttggccaggctggtgtcgaacttctgacctcaggtgatcttcccacctcggcctcccaaagtgctgggattacaggcatgagccactgcgcctggcctactatagcttttgaaataggtcttgacatcaaattgtgtgtgttttctggttttatcctgccagattacttttggttgtatttttggtagagacggggtttcaccatgttggccaggctggtctcaaacttctgacctcaagtgatccacctgcctcggcctcccaaagtgctgggattacaggcgtgaaccactgtgcctggcctcacaagaattcctttttattttgagacggagttttgctcttgttgcccaggctggagtgcaatagtgcaatcttgactcactgcaacctctgcctcccgggttcaagcaattctcctgcctcagcctcccaagtagctgggattacagacacgcacccagctaatgtttgtgttttttatagagacagggtttcaccgtgttggccaggatggtctcgatctcctgacctcgtgatccacccacctcggcctcccaaagtgctgggattaaaggcgtgaggcaatgcgcccggccaggagtttttacaaggaggaagctgaagctggaaaggcacggaaaaggatcctcccctagagcctcagaaggaagcagccgtgcggacaccttggtgtcaggcttctggctcactgaaccgtaagagaatcagtctccattgttttaagccaccaagtttgtggtactttgttacagtgaaactaagcaccctgcacttgcgttgggtgccatggcacacccctccatcccagcgttatgttccccacggtacttacacatctttctttcacttgcagctgaaacgtactttgactaaaacaataacctcattctctctttttaatttcagaagtcacgtacaatcacattgtgaaacttgggaaacaacgcttccttccttcaaagtcagttctgctattcatgtggacctaatgtctctaggatcttgtgccctcattagtggcctggaaggacgcccagaccttccagttcatcaggggttgaagtggacgatagttgttcaccgtcatcttcttctcttcaccaagtgcagaaaacaggagagtacgaaatgcagagagctggaatagagggcagccagggtgagcttggtatgagtgcagggtgagccagcccccaggtgtccctcaggccttgtgtggtctcctcccatgctgaatcaggatggcccgaaatgaccagtaaagatggtggaagtgatggtgtgtgcagggccagcttataaaaggcattgccgcttccgccttggtctttaggatcacttgctctggggggaagctggtcaccatattgggagggtactcaagcagccccgaggagaggcccacagggagaggagctgaggctcccagccaactgccagcgccaacttgccatccacttgagagggccaaccttggaatgaatcctctagccctagttgagctttcagatcgctacagtcccagctgacactgggctacaattcatgaaagatggtaagccagagccacccaaattcacaacccaaggaaactatgggagataataaatgattggtttttgttgtcattgttgttgttgtttgagacagtgtttccctcttgtttcccaggctggagtgtcattggcaagatctcagctcgctgcaacctccgcctcccaggttcaagcaattctcctgcctcggcctcccgagtagttgggatcacaggcatgagccaccatgcccggctaatttttttttttttttttgagatggaattttgctcctgttgcccagactggagtgcaatggtgtgatctttgctcaccgcaacctccgcctcctgggttcaagggattctcctgcctcagcctcctgagtagctgggcttacaggcatgcgccaccacgcccagctaattttgtatttttagtagagatggggtttctccatgttggtcaggctgctctcaaactcctgacctcaggttatccacctgcctcggcctcccaaagtactgggtttataggcgttagccactgtgctcagcctaattttgtatttttagtagagacagggtttcaccatgttggtcaggctggtcttgaactcctgacctcaggcgatccactcgcctcggcccccaaagtgctgggattacaggcatgagctactgcacccggcccaaatgattgttttctaaagccactatgttttgcagctatttgttacacagcaatagataactaacacctataatgtaaatgctaaagtaacatttgaatttacttttcactcaaggaactaaaagactactttttatggctggatgcggtgcctcatgcctgtaatcccagcactttgggaggccaaggtgggtgaatcacctgaggtcaggagtttgagaccagcctggccaacatggagaaaccctgtctctactaaaaatacaaaattagccaggtgtggttgtgcatgcctgtaatcccagcactttgggaggccaggtgtggtggctcatgcctgtaatcccagcactttgggaggccaaggtgggtgaatcacctgaagtcaggagtttgagaccagcctggccaacatggagaaaccccatccctactaaaaatacaaaattagccagatgtggtggctcatgcttgtaatccagctcctcgggaggatgaggcaggagaagcgctttaacctgggaggtggagcttgtggtgagcgagatcacgccattgcactccagcctgggcaacaagagggaaactctgtctcaaaaaaaataaataaataaaaaataaaaaaagactttttatgtattatctcacttgttcacagaatatacttacgaactctgtgaggcaactcacacatttaattaaattcagaagtgagattatgtctacatgctgacagcatactgggccagttagccctgcgtgatgatccagcgccccctagaattgtgcgcgcatggtgcacctggcctcctgggccatgaccacagtgtgctcatccacatttgtggtctgcacatttgttgactgtctcagaaaggcagcctttctcctcccctggaaaactccccgccttccaggacatgtgcctccctggctcccctgctcaggataaggggctcctgccctgcatttttatatgacaccggccaccctggcttaatactattggcttcgtttctactttcctgccagacagcagtattctgagacgaatgccctgttcctgtgccgcccctccacacctgcccccctcccaccctctcttggtggcacagacccagaatgggcacttgtcacatatatgcttgttgagtagcataagggccttgctgacaaggggccaccttcaacaaaagccttccccatgtccaacagctctggtttggaggtaggcagatattctgcatcccacatctccacgtgcaaatgacatcatgccatggtttgtatataagggaatattttcacaggcccaggagactgaaagaccctctaagagctcacctggagccctcagaaagagatgagccagagatgctaagtcctgctgcgactgctgagaaatgtctgccgggcgggggcggggcataggcagcatgcctgtggctctgaactgccttggacagacagaattgctatagattcttaagatttccagaaaaaaatgatagtataacttttatttattttttattttatttttttgagacagtctcactctgtcgcccaggttggagtgcagtggtgccatctcagctcactgcaacctccgccttccaggttcaagtgattctcctacctcagcctcccaagtagctggcactacaggcacacgccaccatgcccggctaatttttgtatttttatttatttatttatttgagatggagttttgctcttgttgtccaggctggagtgcagtggtgcgatctcggctcactgcagcctccacctcccggcttcaagttattctcttgccccagcttcccaagtagctgatattacaggcgtgcaccaccacgcctggctaattttgtagatttagtagagacggggtttcaccatgttggtcaggctggtctcgaactcctggcctcaagtgatctgcctgtctcagccttctaaagtgctaaaattataggcatgagccatgacgcccagcccaatagtataacttttaaaaatgtatacaaggattattaactaattttcgaaaaaaaaaagcaatgaaactatttagataagaaaaaggaggccgggctcggtggctcatgcctggaatcccagcactttgggaggccaaggtgggcagatcacctgagttcaagaccagcttggccaacatggtgaaatcccgtctctactaaaaatacaaaaattagccaggcgtggtgatgggtgcctgtaatcccagctactcgagaggctgaggcaggagaattgcttgaacccaggaggtggaggtagtagtgagctgagatcgagccactgcactgcagcctgggcgacagagcgagactctgtctcaaaaaaaaaaaaaagaaagaaaagaaaaaggaagaaaacaaaaaccatgcagacccatgacgctgggacaactcccatggatgccttgtgtgtctgtgtgtgatagattagggcattgctcagaacatgctcgctgtgatcactggaaccgctgtccaatctcaacaagctcctacttcaattggaactttcttcttgtgtaagaacaccccaaatgcatgaaagaatatatataactcctcaaggctcttatgcagcatcttagtgacgctgccaagcaagagagacgccttccatgaagcgccatcatgccagttacgggcacggctcacttggcttggggccacttcaacgggctccttctggatgatccaggtgaccgactcggtcagcggcggggtggtgagcgagcccacataggtccagtaatcccagcaggtgggcagcagagcggaggggtcgaaggggcgcatggccgcccgcgcgtcctgagagaccgagaagccaaggccgtgtcagtcctcaggcgggactaggagcttccatcttgtctcagcacgggaggccttcatggtgcttggaaggaagtgctttccccgagataaggccatgaggccactgctgtcacacttggaagcagtgataagaaaatgtgacccttctatacagagcaaggattcctgccaacttacattggtgggaattacattacattacaccagcttatgttggtgcttacatttttccttttgaagtcatttcttggggcgcagtagctcacccctgtaatctcagcactttgggaggccgaggcgggtggatcacttgaggtcaggagttcgagaccagcctggtcaacatgatgaaaccctgtctctactaaaaatacaaaaattatccagatgtggtggtgggcgcctgtagtcccagctactcaggaggctgaggcaagagaatttcttgagcccaggaggcagaggttgcagtgagctgagatcacgccactgcactccagcctgggcaacagagtgagactctgtctcaaataataataataataataataattaataaataataaaaacgccatttcttttagcataccttggctgcaaaaaatattactttttattgtgataaaatatacataacataaaatttaccatcttaacctttttttttttttttgagatgcagttttgctcttgttgcccaggctggggtgcaatggtgcgatcttggctcactgcaacccttcgcctcccaggctcaagtgattctcctgcctcaacctcctgagtagctgggattacaggcacccgccaccacacctgctgattttgtatttttagtagagacggggtttcttcatgttggtcaggctggttttgaactcccaatctcaggtgattcacctgcctcagcctcccacagtgctgggatgagaggcatgagccaccatgcccagcccatcttaacaatttttaagtgtaaagtttcatggcgttaaatgcagtcacattgtggtgcaaccatctccaccatccgtctccagaacttttccatcatcccaaactcaaattctgtcctgaccccactaaacactatgtccagcttcctcccccaggcctggcacccaccattctgcttccatctctctgaatctgaggactctggggacctgatgtgggtgggatcctgtggtttttgtcttttgtgtctggcttatttcactgggcataatgtccttcaggtttatccacattggagcatgtgtcaggagtccctgcattgttgctttttttttttttttttttttctgagacggagtctcgctgtgtcacccaggctggagtgcagtggtgtgatctcggctcactgcaagctccgcctcctggagttcaagaccagcttgaactcctgggttcatgccattctcctgcctcagcctccccagtagctgggactataggcacccgccaccacgctcggccaattttttgtatttttagtagagacggggtttcaccatgttagacaggatggtctcaatctcctgacctcgtgatccgcccacctcggcctcccaaaatgttaggattacaggcatgagccaccgtgcctggcttgcctggagacatttctactgctaccttaccgatcagggtatccagtatctccgtgattaccttcatctgtccctggaaactgtgcctgccaccctacgctgcagccgtccagggactggcaggcctcggcctaaaggtctggagggtgggcgacctgcaagactcacaagaggggaagccaacagacatacctatagacggagtgctgtgcccctggtgccgacaagaaagccaaggctcgggctgggtcagcaaccgaattccagtttagaggcagatttggtcgtggacatggccagccacctcagtaaaattagagaggattattttgcattgaatacactcacagccaaaaaacaaaaaaaaagagtcagggtcttactttgtcaactaggcaggagtgcaatgatgccatcatagctcactgcagtctctaattcctgggctcaagcgatccccccgcgtcagtctcccaagtagctaggacaccataccagggtttaaaattaattgtttgtagccaaggggtcttgccatcttgcccaagctgttctccaactcctgggctccagtgatcctcctgccttggcctctcaaaatattgggattacaggcataagccactgtgcccagccagctcttttggatatatacccagaagtgtgtgattgctgaatcatagggtagttctatttataactttttattttttttatttttttgaggcagagtctcactctgtcttccaggctggagtgccgtggcatgatctcggctcatggtggttgggcctggccgcaacacagccttcatcagcatcccatgccaaccaagcacaactctgcacctgtccctggccagcactgtgggacaagagtccagtccaaagtgacagagtccctgtctgcaaggaagatggcctccctgctcagccacatcacatcaccttgactttgctgggccctggccttccaaggtggaagccggcaacctagatgccttgggcttgtctcctaacatcaagcagtgagggtcagggtcaagagaggtggctgagctaccagaaggaagcccaggagtgtccacgccggcagacacatgcatcagttctgtgcacacgtgttcacgtttataattatccagttaattaaaaaaaaaaaacagcattataggctgggcgaagtggctcatgcctgtaatcgcagcactttgggaggccaaggcaggcagatcacctgaagtcaggagttcaagaccagcctgaccaacatggcgaacccccgtctctactaaaaatacaaaaattagccaggcatggtggcaggtgcttgtcatcccagctactcgggagactgagacacaagaattgctttagcacaggaggcagaggttgcagtgagccaagattgcaccattgcactccagtctgggcaacagaaagagactcggtctcaaacaacaacaacagcaacaaaacccacagcattattgtgatagaattcacataccatgcaactctcccatctaaagtgtacaacctggttgggcgcgatggatcatgcctgtaatcccagcactttgggaggccgatgtgggaggactgcttgaggccaggagtttgagaccagcctaagcaacataacaagaatctgactctacaaaaaatacaaaaactagccaggtgcagtggtacatgcctgtggtcccaggtagttgggaggctgaggtgggaggatggcttgagccccggaggttgaggctgcagtgagctgtgatcataccactgcactctagcctgggtgacagagtgagatcctttcttaaaataagtaaataggccgggcacagtggctcatgcctgtaatcccagcactttgggaggccaaggcgggtggatcacctgaggtcgggagttcgagaccagcctgaccaacatggcgaaaccgcgtctctactaaaaatacaaaattagccaggcgtggtggtgcatgcctgtaatcccagctactcgggaggctgaggcaggagaatcgcttgaacctgggaggcagaggttgcagtgagctgagatcatgccattgcactccagcctgggcaacaagagtgaaactccatctcaaaaaaaaaaaaaaaaacagaaaaagtaaataaaaaattgaagtgtacaattctatggttttgggtatattcacagttgtgcagccatcccaagtcaattttagaacattttcagcacctcaaggaggaagcttggtactttttagctcttctccccacccccgccgtgctgcttctgtctctgtgggtttcataggaactgagtcatgtaacatgtggaacatttgtgtcttgcgtctgtcacttagtatggtgcttttgaggctcacccacaccgcagcgtgagttagagctgtgtcctttctgattgccaagtaatatctcattgcatggtctagctgggttgacatcccattgcacactctagctgggctgtgaaggagcaggctgcttgtgcacatgggtaacggatgtacagtgagacgtcagtctgtgcacatgggtaacaggtgggtgcaccgtgaggtgttagtctatgcacatgggtaacaggcgggtgtgcagtgagatgtcagtctggtgcacatgggtaacaggcaggtgtgcagtgaggcgtcagtctggtgcacatgggtaacaagtgggtgtgcagtgaggcgtcagtctgtacacgtgggtaacaggtgggtgtgcagtgaggcgtcagtctggtgcacgtgggtaacaggcgggtgtgcagtgagatgtcggtctatgcacatgggtaacaggtcggtgtgcagtgagacgtcggtctgtgcacatgggtaacaggcgggtgtgcagtgagacgtccgtctatgcacatgggtaacaggcaggtgtgcagtgagatgtcctctcctcctgccggccacacgtccccgctcccagggcacagatgtgccagtcactttctgagcaactacttcaaatcttcagaacaacccttcaagaagtatttctagtttactgatgaagatagacagacagatataaacaacttgcccaaagccatgttgccagtcagggccactgaggcctggccctttccaaggtgcgggctcttctctccctccccaggactgcaggaatcagtcgggggagtggcaggccccagccattccactgcgtgcaggtttcctgccaattaagctttccagccttgggctgagaagaggatgcctgtgtgttgcctcatcgtccccaggagttcctgtcctgtctctaagatgcatgagagctggagcagccatgtggttacagaaagctgctccccctcagggcccccaaaggaagtcagggcccttcctttatgcgtgtggtgagccccaggcagctagaatgggacaccggtgagcacaccaatgaggctgaagaccatcacatccattatctgagcacggatggcccagctacctgtggaaagcaccacaagcctttgctggcggaagtgggttggtgacttgttccacttttctcttatttatttatttattttgagacggagtttcgctcttgttgcccaggctggagtgcaatggcacgatctcggctcaccacaacctccacctcccgggttcaagcgattctcctgccttagcctccctagcagctgggattacacgcatgcaccatcacgcctggctaattttgtatttttaatagagatggggtttctctatgttggtcaggctcatctcaaactcctgacctcaggtgatccacccgcctcagcctcccacagtgctgggattataggcgtgagccaccgctctgttcctggttttgtcttctttctcttaaacaggaccccgcattttatgagcgtcaagcctcacccagcctaactccgcccttggtttgtcctcttagagtctcagtttccccaggtgtacgacaggcagtgtggtggctgtaatgggcttccatcagtgcctgccacatgggcgtggggctcggtaggtgctgccgctgctgctgccaaagctagaagagcccccacagggcatagagccattccctggatcccctggacctggtgggctgtttccaactccacaaggcagccaattccccggtagccctgactcttgcgaaggcagggaggaggggggaccccagcagcctgaggagcttgcagcttgtccaggcatggagggtggggaccctctgtgggcagtttttgccaaaacttctggctatggtgagagggtcaaaggcgaagcctcgaggtctccattctgggagtgtctgcccagggtcaccggggccacactggggctgggcctgcgtgctgggagctgagtgcatagtgacaggtcggcactggtaggggcctgtgcagatgggacggcgctgggggtgggggtgggggtccgggcttccaggcggcgcctaatgtggttttggttatagacactgcctgtgtttccctctaagctgctgaaaagctcagaaatgtgcagcagggcctggagctcagcctgggttctgactgcatgtgggaggtgggcgctgggacgactgggagttcaggctgcatggacccacttcctgggtttaaaaacgggctcttcacctgccacctgtgtgcccgggcaaggccttctctgcctctctgagctttggtttccctgtgtgtgcaagacagatgaatcacaggccctgccccgtggagtgattggaagattcagtgtgataatttatatggagggctgtcgcttctttgaacccttcccaccgaggtgtggggcgatgtccccttgccctgagcctgggcaggtgctcctggcgggagtggtgaacaggatgccgcaggagcagtgctttgtgactctggaagccagggcagaaaagacatcgtgtccgtctggctctttctggaaatgcacccttggagccctgagcactgcatagaagccagctgggtccccagggaatgaccgtggcaggcattcctggagggtctctgccgagtcagtcccacagcagggcccggaccagcctggaactaggagagatgatggggactacgtgactctggtctttcctgccctagttcaggacagcttgttccttaactggaggaaaccaggaaaacagcccagaagctgcaggtgagcccatccctgggtgaggactgctgagtccgcgggggtgagaggcagagctgggatttgaagccaaggccatctgcccttgagcctgaggccaccacggccccgtcctgccctgcactgcccaccaatcaggagttagattcaaccacacttctagcattttccatcagaaggccatcattctaaagtttcatggactcccaaaaggtaatagctctctctgggaatcagctgactgaaagcacccgcagcaacaaaaagcgactttaaccttagtgattgggctggtggattttcgtttcgtgacaggcagcagcagcctgtgcattccacagcagacgtgtgtgtgtgagtgttggccacagctgggccttaaactcaactgcacatttcaccaagaaccagacatgctccttattccattacatggtgagaatgctgctctagtgtggatttttttttttttttggagacggattctcgagctgtcacccagactggagtgcagtggcatgatctcggctcactgcaacctccatctcctgggttcaagcgattctcctgcctcagcctcctgagtagctgggattacaggagtgtgccaccacacccagctaatttttgtatttttagtagagatggggttttgccatgttggccaggctggtcttgaactcctgacctcaggtgatctacccacctcggcctccctaagtgctgggattacaggtgtgagccaccgcgcccgggctactgtggatgtttaacatctccatttcacaggtgaggaagctgaggctcagaggtgcgcagctcaggagtggtggatcagggctctggacccaggagtccaactgtggggctctctgatacactgtgctatgggagaagctcccagaagtcctaggctaggagcctctaggcgagagggttgttcaagtctcttcccattccctgacccatgaagcatagactcttgccccgaaggctgggtcttttacctcctaaggtctttttttttttttttttttttgaaatgagtctcgctgtgtcactcagcctggagtgcagtggcacaatctcagctcactgcaacctccatctcccagattcaagcaattctcctgcctcagcctcccgagtagctgggattacaggcacccgccaccatgcctggctaatttttgtagttttagtagagataggctttcaccatgttggccaggctggtcttgaactcctgacctaaggtggtctgcctgctttggcctcccaaagtgttaggattacaggcttgagccaccgcactcagcctcttaaggtcttttaatttctcaaaggtctaactcggccaggcgcggtggttcacgcctgtaatcccagcaatttgggaggccaaggtaggcggatcacttgaggtcaggagtttgagatcagcctggccaacatggtgaaaccctgtctctactaaaaatacaaaaattagccaggcatggtggtgggcgccggtacttccagctactcaggaggttgaggcaggagaatcagttgaacctggaaggcggaggttgcagtgagccgaggtcgcgccattgcactccagcctgggcaacatagcaagattctatctcaaaaaaaaaaaaaaaaaaaaaaagagtctagctctttattttcagctgaggggatgagcccagagatcagcatcaggaccagagctcagtccgcggtgcacttcctcccctgtcccgggcatcattcctcccctgtggtttgcctagaaaattttgacttaccccatggggaagaaatgctccagaaccttccccaggaggaaaacagcccttgggtaaagggtccttcacagccagctcttttctttcccaccaagaggtgggaccacctggtgtgggaggtggaggctggctgggaaaacaacccctccccaggtttcctctggctgtggagccgcgcggaggaagaggatggggcgtcagagctctcagaaccgtggccttgtgaagtttctgagcaggcaaatggggcggcggggggtgatctggtcccagccccaggaggccgccccgaagccagcatcaaggcgaaggccacgtacagatcaaacggctccttgaaccgcgaggaagggctcgccccagctccatctggaccagcccgcaccattgttaacacaggttgaagcctcatccgtccgcacatctgaggcttgcgttgactccttctgccctggaattcttttgtttgctgctgaataaataaactacatttctttggaatttctccttctccctcaaagccttttctcagctgatcttggagaaaggcgacactcttgtccccgccatcttttcgagctgtgctggatgcagggaagcgtatggagagctgggcgctggatgcagggaagcgtgtggagagctgggccggagagccgcggtttgggcaggtttctctctgcccttgggcttggggtcggacagggacgttcaaggagatgctgggtggtacatgagtcaacattcttaaatgttattagttagggatttgaggtttttgtttcaatctgttttcaaacaaactttatcattagtgaatatcatcacccaggacaaggctaaaaatttttcgagctaatcaatttaaagaaaaatattaagtaggctgggcgcggtgattcacgcctgtaatcccagcaccttgggaggccaaggcgggcggatcacctgaagtccgcagtttgagaccagcctggccaacatggtgaaaccccgtctctactaaaaatacaaaattagctgggtgtggtggcgcacacctatcgtcccaactgcatgggaggctgaggcaagagaattgcttgaacccgggaggcggaggttgcagtgagccgagatcacgccactgcattccagcctgagtgacagagggagactcctcgaaaaaataaaaaagaaaagaaaaatattcagtagaaagttgtcccattggcaggcagatatgtcaaagtcttcaggatcttgcctgcacgactgaattttgggaacttccattgagcccaacacccttattttatggaggaggaaacagggtcccagagcagtggtgacgcattcgaagtcaggaagagctagctgtggacacacgagcatcaaccctgcggaatcctgtttccagaactggaatcacagcgcctcggcggggctctttccactatgagatttctttttccttgcaaatgaatcgctgcactaaacaattttgcttgtcaaattatgctgatttcttttctttttttttttttttttttgagataggatttcactcttgtcacccaggctggagtgcaacagcgcgatctcagctcactgcaacctccacctctgggttcaaacgattctcctgcctcagcctcccgagtagctgggattgcaggcatgtgccatgacaccctgctaattttgtatttttagtggaggcgggatttctccatgttggtcaggctggtctcgaactcccgacctcaggtgatccactgcctcagcctcccaaagtactgggatcacaggcgtgagcctccgcgcccggcctgctgatttcaaatatgcagcttaccttatgttttacttccagcaagacgtccaccagcctctgcagcatctgatgatgggccccgagctgcgtggcagacacacaaggggttagctgaaaaggcagtgggtggcggggggaagctcactccactataaatacaccacgttttaaaagcaatcctaggccaggcacggtggctcacgcctgtgatcccagcactttgggaggccgaggtgggcagatatctaaggtcaggagtttgaaaccagcctggccaatatggtgaaaccctgtctctactaaaaatacaaaaattagctgggtgtggtgacacactcctatagtcccagctactgggaaggctgaggcaggagaatcacttgaacccaggaggtggaggttgcaatgagccgagaccgtgccactgcactccagcctgtgtgacacagcgagtcctgtctcaaaaaaaaaaaaaagcaatcctaatgatggatcaccactttcttcattagatctacaccccagcaagcgattacctttaaaaacacgcctatcacagaaaccattctctcccacgacagcttccttgtaattttggtatttcacagaattccagtgaactaaatgcagctgaaacacaatggaaagagaacttaaattgatcagcaagaaataagacagtcacttccccttctgaatggctgacctatgtgtccacttaatcataatgaaatggccaggcgcagtggctcacacctgtaatcccagcaccttgggaggctgaggcgggtggatcatgaggtcaggagatcaagaccatcctggctaacatggtgaaaccccgtctctactaaaaatgcaaaaaaaaaaaattagccgagcatggtggcgggcgcctgtagtcccagctactcaggaggctgaggcaggagaattgcctgaacccaggaggtaaagcttgcagtgagctgagattgtgcctctgcactccagcctgggtgacagagcgcgactccgtctcaaaaaaaaaaaaaaaaaaaaaaaaagaactaagttgttgcagccagatgtgtaagatcccagcactagcagcacctctgagctcccaggcacttgatgaagccatgggaaggaagagcctcagtcttcctggtggtgggaaaaaggagaggatcatgttaacctcatccaatagaaatgggtggtttcattattttctacttcctagttatccttggacaaggattaccagaaaaaactcacgcctcggctgggcgtggtggctcacgcctgtaatcccagcactctgggaggccgaggcgagtggatcacgaggacaggagttcaagaccagcctggccaagacggtgaaaccccgtctctactaaaactacaaaaattagctgggcgcggtggcaggtgcctgtaatcccagctactcaggaggctgaggcaggagaatcacttgaacctgggcagcagaggttgcagtgagccaagattgcgagatcgtgcgatcgcgccactgcactccagcctggggaacagagtgatactcagtctcaaaaataaataaataaataaaatatctgttcatcaaaaataaagttgcagatagagatactaaaataaaaggcatgttgttaaatgaaaggaagcacacagaagccattgttgcgctcattcttggaactatttataaatatctgtatgatgatgacaatagatatcactccctatttataaaatgtccggaggtcacctctgggtgtgcgattacaagcaattttcattttttggtttgggtgcactctagttccacattaactgcagcattactttcataacaacaacaagttcaaaaaacagaaagagtcctcaacttgaaaaagcatcaagaagtcaggtgagtgggtgagcagaggtgtgataaagtgaatatggcaaaaatgatcatcacaggactgagacgtcaaactcatagattcttcttgttcatttcttttcattttttcgtatgttgcaaaaatttcataataaaatatttggggaaatctataaggcatcacttatcacccaaaaaaactacaaaaaccaattcccagcattgatctgcactcattttctctactgactcccactttggaatgttgaaaataagactgctttaagaagatgatcttggccgggtgcagtggctcacgcctgttatcctagcattttgggaagctgaggtgggtggatcacttgaggtcaggagtttgagaccagcctggccaacatggcgaaaccacatctctactaaaaatacaaaaattagcagggcctggtggcacgcacctgtaatcccagctactcggaaggctgaggcaggagaatcgcttgagcctgggagatggaggttgtggtgagccaagattgcaccaatgcactccagtctgggtgacagagtgaaccctgtttcaaaaaaacaaaaaacaaacaaacaaaagaagatgatctctattgcaaagatgttcagcttctcagcggagggccttgtggatttgctagtccctacagctgcaagcacacagctgagtgaagcgtggcaaagagctcaagctctgactttgaatcccagctgtctggctttggcaagttccgtaaccattcagaacctcagtctcttcttccgttaaatgagagaacttacagtgtcttcttcgtaggaggggggtgtgaccaaacgggtggggcggccgacggttctggtttgagcactgacagtcccaggccccaggaaatccttcacatctgagcggcaggcatggcttgttcaccccccaccatagagccggagacatggaaagcgtccagatatgtgctgttaggccacgtctacaaacctctgcggggtacacgtggccgtccactgtgtgctctgagcccccctcgttcactgctccccagtggaagtgaaattgcttcagtctgtagtggttttccaagggcccgccactaattcctggaaataaaggcagcgagacgtgtgtgtcattttgtctgtttgttgagctgtggtgttacctgaggcattgtctacattagggttatatgagttcactcgcaaggggttgctgtatggttgaagtgacaagccaaaggtgggctccgtgaaaggtgggctctgtctgtcccattcactctgccccccgccagcccagcgcctgcccagaggttcacagtaaatgtggaatgaaggcagggtcccagtgctgccactgggtggtggtgagggcctcatctccctgcaggcagaaatcggtaaagaaagtttctgagatgcctgcctgtcctataagatttccagactttaatttaaaaaaaaaagatgtcttccaaatattttttaaaagcagcttaaatcctatcaccaaataacattataaaataacacaatgagcaaagtttttgttttgttttgttttgttttgttttgttttaagacagaatcttactctattgcccaggctggagtacaatggcatgatctcagctcactgcaacctccacctctgggttctagtgattctcctgccccagcctcctgagtagctgggattacaggcatgtgccaccaggccaagccaatttttgtattttaagtagagacggggtttcaccatgttggccaggctggtctcaaactcctgatctcaggtgatccactcgcctctgcctcccaaagtgctgggatgacaggtgtgagccaccgctcctgggtgagcaaggtttttaaataagcagaccctgagctatagcatcagtcctgatctctggcagtccctgcttaatctaggcccaccacagggccagcttttattggaacactccttccgtcctaagtcaccctaaacactcaccttggagtcagcgctctccacctgcaggccttggggtgcccctctccatggcacagtgccaggtgcagcctcccaggagcttccttctcctgacacgtggggctcagccataagcatcgctcactgaggcctctggctctgcctcacagagtcatggctgccatccccaggtccaggtagtgctgggagtctgccttttaacgagctccccaggggttctgatgtgggtggcttctcctgtgtctaagcactttgtcactaacagatttccatcaacagctgctacaaatgtggtacctattccacacgttttcattgaaaggagcacagtgtgctcctgggatggctgggcaaggctggaaggcgccagcagaactggagcactgatcacgaattcgcggtggcccgagtgcctcccgtagctgtggaggagcctcgtgtcacccgccttgctcatgtcacctcccactgtggcaaaagccaggaaaacactgagcgcatgacaaatgccttggggagcttgacagtgctgactcctggtggtttcctgacaccaaaagtacttgggctgggcgtggtggctcacacctgtagtcctagcactttgggaggccgagatgggcggatcacttgaggtcaggagttagagaccagcctggccaaggtggtgaaacccatctctactaaaaatacaaaaattagctgggtgtggtggcgggcgcctgtaatcccagctactcaggaggctgaggcaggagaattgcttgaacctgggaggtggaggttgcagtgagctgagaacgtgccactgcactccagcctgggcgacagagtgagactcagtctcaaaaaaaaaaaaaaaaaaaaaagtactcatagttggaggcaccaaggtgtaaactggaaaatggaaaatggatttggctttggtccagtcaggggctaggcaagtgctggaccaagccacagagctgctcactgcccctcttcactcaaaatctcagtgttggtctggagcaacctcggagtcatatctagttttaaaattctaccattatgagcaagtcttctagtctccttaaatatacacagatgaattacatctcaatttttaaaaatacacagaaagagtgcttcacacaataagcacattaaatcactttgttaggccaggcacagtggctcacgcctgtaatcctaacactttgggaggccaaggcaggtgtatcacttgaggtcaggtgttcgaaaccagcctggccaacatgctaaaacctcgtctttactaaaaatacaaaaaattagccaggtgtgttggtgggcgcctataatcccagctactcgggaggctgaggcaggagaattgcttgaacccgggaggcagaacttgcagagagccgagatcataccaccgcactccagcctgggcgacagagcaagactccgtcttgagagaaaaaaagaaagaggccaggcgccgtggctcacgcttgtaatcccagaactttgggaggctgaggcgggtggatcacaaggtcaggacatcaagaccagcctggccaacatggtaaaaccccatctctactaaaaatacaaaaaattagccagatgtggtggcacgtgcctgtaatcctagctactcaggaggctgaggcaggagaattgcttgaacctaggaggtggaggttgcagtgagccaagattgcatcactactctccagcctgggcaacagagtgagaccccgtctcaaaaataaataaataaggccgggcgcagtggctgacacctgtaatcccagcactttgggaggccgaggtgggcggatcacctgaggtcaggagttcgagatcagcctggccaacatgatgaaaccccgtctctactaaaaataaaaaattagctgggtgtggtggcatgcacttgtagtcccagctacttgggaggctgaggcaggagaattgcttgaacataggaagcgaaggttgcactgagccaagatcgtgccactgcactccaccctgggcaacagagtgagactctgtctcaaaaaataataataataaataataaataaataaaataaaataaagtctactcttactcttaaaaaaaaaaaaagaaaaaaggccaggcatggaggctcacgcctgtaatcccagcactttgggaggccagggcgggcatatcacgaggtcaggagatcgagaccatcctggccaacatggtgaaaccctgtctcaccgggtgcggtggctcacgcctgtaatcccagcactttgggaggccgaggcgggtggatcatgaggtcaggagttcgagaccagcctggccaagatggtgaaaccccgtctctactaaaaatacaaaaattagccgggcgtggtggcacacacctgtagtcccagctacttgggaggctgaggcaggagaatcgcttgaacctgggaggcagaggttgcggtgagccgagattgtgccattgcactccagtctgggtgacaagagtgaaactccatctggaaaaaaaaaaaaaaaagaaaccctgtctctactaaaaatacaaaaattagctgggcatggtggcatgtgcctgtaatcccagctactcaggaggctgaggcaggagaatcgcttgaaccaggggagttggaggctgtggtgagccgagatcgcgccactgcactccagcctggcgaaagagcgagactccatctcaaaaaaaaaaaaaaaaaaaaaaagaggccaagcgcagtggctcaggcctgtaatcccagcactttgggaggccaaggcgggtggatcacgaggtcaggagattgagaccatcctggccaacatggtgaaaccccgtctctactaaaaatgccaaaattagctgggcatggtggtacgtgcctgtaatcccagctactcgggaggctgaggcaggaaaatcgcttgaaccagggagtcagaggttgcagtgggccaagattgcttcattgcactccatcctggcaacagagcgagactctgtctcaaaaaaaaaggaaatcttcctgcctcagctcctgagtagctgggattacagatgtaagctaccacatctggctccaatttaagtatccacatgtggctagttgttatctattggaacacgcagttctggaggctttaatatagggactccttatggagaaatggatatggttaaaggaggctacaaggaatgctgaagccctaagagactagcaactattggagcctgttactgcttctaggactgatggggtaacaggcagaaactgtgttaccgaaactcattaaaacctggggatgtagaaggggccacctgacaggtgctgcagatgtgggtggggagatgaagccactgccagagatgtgaggcacagcaggaagggagcagaatagaaatgtcctgactgtcctcccccttggagctccagccagtcctccctttagctaaactcaagtgaaatccaggccgggtgcggtggctcacccctgtaatcccagcactttgggaggtccaggcgggagttcgagaccagcctggccaacatggcaaaaccctgtctctatttaaaaatacaaaaaaattagttgggcgtggtggagggcacctgtaatcccagctatttgagaggctgagacagaagaattgcttgaaccggggaggcggaggttgcagcgagccaagatcctgccactgcactccagcctgggcaacagatcgtgactccatctcaaaacaaaacaaaacaaaacaaaaaacagagggtgggggagcctccagggcagagggtagggctgagaataggtctgggagtgagggtagatgatgaccagcccagagccacaaaccccaaaacatcacctctgaaccccagggctctgaggaaccctgtctgaaaccacttcctaggtgggacacatccaactgaacggaaacagaactgaacagatacgagggtggggggacccctggaggtcccttctgagggatctttgcttagttctgttctgttcctttcttttttcttttcttctttccttttcctttccttttctttctttctctttctctctctcttcctttcctctttccttttttttttttttttttaaccgagtctcgctctgtcacccaggctggagagtacagtggcatgatctcggctcactgcaacctccgcctaccgggttcaaatgattctcctgcctcagcctcccaagtagctgggattacgggtgcctgccaccaagtccagctaatttttgtatttttagtagagacaggattttgccaagttggcaaggctggtctcgaactcctgacctcaggtgatctgctcaccttggcctcccaaagtgctgggattataggcatgagccacctcgcctggcctttactgagttcttaaaggctgagacaggaaaagaaaaatagtaaactctgtgcgtaatttcactattttcttgtttaactttatgactgtcctggagagggcagcatcattacctttaatttagagctgggacagggacagtctgtgacacttatcttgatattgaggaatggagtcagtcctccaatggagggaggccgattgaggtgtgatactgagtgccccatcagttgttcaagggctggggcagatctaatattgtgtctgtactggctgatacttaggtggccagggccccagctttggaaacctgtgatggctgctaccacctctggctttgctaggcgcacacatctgcccagactcaatgtattgcaaacccatgcaacctccaggcccacactgagaatcaagaattgtggactcttgattctccaaatcttctcaaaagcccagctgctggctgggtacagtggctcacatctgtaatcccagcactttgggaggacgaggcgggcggatcacttgaggttaggagttcaagatcagcatggccaatgtggtgaaaccccatgtctactaaaaatacaaaaattacctgggcatggtggcaggcacctgtagttccagctacttgggaggctgaggcaggagaatcgcttgaacccgggagacggaggttgcagtgagccgagatcgtaccactgcactccagccttggtgacagggcgagactctctctcaaggcttgagggctgagtgaacactccttaactatttccagttatagccacgggtcgacttagatcaacagaagtctgtatggattactctaatagagtgcaaaaagatctgaactaggacctcattgtgaattcggatcctaccccttaccagctgtgtgaccgtgggcaagacacagaatctctgagctgtcactgccctctctgtaagtgaagtggcacccacttcttatgtctgtgttggtcctcttctcctaattgacactcactcgtttttcgttgttttttttttgagacggagtgtcgctctgtcgcccagactggagtgcagtggcacgatcttggctcactgcaagctccgcctcctgggttcatgcaattctcctgcctcagcctcctgagtagctgggactacaggcgctcgccaccacgcctggctaatttttcgtatttttagtagagacggggtttcaccgtgttagccaggatggtctcgatctcccgacctcgtgatctgcccgcctcagcctcccaaagtgctgggattacaggcgtgagccatggcgcctggccactcttttttttttttttttttttaactttgagatagaatcttgttctgtcacccaggttgaagtgcagtggcataatcctatctcactccaaactcaaactcctgggttacagcaatcctcccacttcagcctcccaagtagctgggaccacaggcacatgcccccctgcctggctaatttttaaaattttaagtagagatagggtctcaccgtgttgcctaggctggtctcaaactcctgggctcaagtgatcctcccaccttggcctccaaaagtgttagggttacaggcatgagccatggtgcctggtgacactcactcttgagttgagctcacacagacccctggctttaaatatcatccaaatgttgatgtcccccaagttttcatcttcactgcagacctcttctgtgagcttcagaactgctcacttgaaacttccccttgggtgtctgacaggcaacacaaacttaacatgtcccaacatgaactttttttttttgagacagaatcttgctctgttgcccaggctggagtgcagtggcctgatcttggctcactgcaaactccgcctcccaggttcaagtgattctcctgcctcagcctcccgagtagctgagattacaggcacgtgccaccacacccggcaaattttttgtatttttagtacagacagggtttcaccctgttggccaagctggtttcaaactcctgagctcaagcgatctgcctgcctctgcctcccaaagtggtaggattacaagtgtgagccaccgtgcccgggcccaaaatgaactctttatcttctcccccatacctgctcctcctgcagccttcccatatcagaatacaacaattctattcttacagttggtgtggccgaaaaccttggtgttgtcctcaatcctctctcacacatccccaaatccaatctgtcaagaaaccctggtgatcacttgagcccaggagtttgagaccaacctgggcagcatagcaagaccctgtctctacaaaaaatacaaaaatcagcggcagggcgcagtggcttacgcctgtaatcccagcactttgggaggctgaggcaggcagatcacaaggtcaagagatcaagacaatcctggccaacatggtgaaaccccgtctctactaaaaatacaaaaattagctgggcatggtggcacgtgcctgtagtctcagctacttgggaggctgaagcaggagaattgcttgaaccagggaggcagaggttgcagtgagccaagatcgtgccactaccctccagcctggtgacagagcaagactctgtatcaaaaaaaaaaaaaaaaaaaaaaaaaaaagctgggcatgatggcacacacctgtggtcccagccactcaggaggctaaggtgggagggtcgcttcagcccagaagttggaggccgcagtgagccataattgcaccagtgtactccagtctgggccacagaataaaactctgtctctagaaaacagaacaaaacaaagttgaagctctctaaactctccacactgactcagagtgaaagtgctaataatgacctaaagccgtgccctatggccccctttcctcttgacttcgcttttcatgcactctgctccagccatactggcctccttgggcttcccagaacacgcgaagcaggacccaggttagggcctttgaactggctttgtttgtccgtgggattccccatgaacatctcatggctgctccctctcttccctcaagtctcccctcagatgtccccttctcagagacatcagcctgtagaaaggagcacttccttcccccactttcctgcgtgatgtttctccatgatgcctgcttcctacatatgtagagtctgtctcactccggagaaggctacctccaagaggacaggtgactggcccttgatttcattaattgtcacaatcctatgccggacacatggttggtgttcaacaaatatttgcggaattaaagaacaaattaataatgttgtgagataaatactctgtgcccatttttctttactttttaatatattttttaaatctagagagacagggtctccctatggtccccaggatggcctcaaaactcctcctgccttggcctccttggctgggattactggactactactgtgccaccatgcctggctcttcttttccttttactatgcccattttaaaggtgaggaaaactgagactcagaaatgttcccaagggcacacagtgagtggtggctgccttcaggttggtctgactccagtgcccaagcctttctcaggagtggtgtgttgcccatcagccattatatccatgacatcaactggcataagatatgttcttatatgaaaattaattttagaagtgagtgtcacgaaatattgaccttctctaaggaactagttcttatagtcaaaaaggaggaacttatgtaaattttccctttcagggccagccccaggaagttcagagcctaatgtggtgttcattctattaattttttcttaccctgggacttttttctttctttcatttatgttaacctaatcaccagctgcttcctgttccttaggaaatagctaagtcgtacatgacacttttggggttccagtgtgcccggcatgggttttctttcattgggcaggcactaggtgggcttttcagcctgaagacgcatgtttctcatcagagtgagaatgatctctgatcattctccttcttccatttcttgggttctctcttcctggcactcctattggttagcttttgggcctcttggattgcctggctgtgtctctgtggcaaagactactcattatccaaaatccaatgagcccttcttccccaagaacatggtggaactgcatgtcccagcctcccttgcagtaggcatggtcatgtgactaagtttccaccaatagaatgtgaggaggtgatgtatgtgacttctggtctttggccttaggaagtaggccagcttcatactctccattcctgctggctggagatccccacaacagattcaaacgtgcaggtgacaaacggtgccctaccgatggcagaaaagtgatgaggaagggcccttggtccctgagcaatgagagaagcagagctgcctccctaactaccaccatttcacttgaacatgtctcttcttttgtttatttatttatttgttttttgcagacacgtctcttcttttttttttttgagatagagtctcactctgtcccaggctggagtgctgtggcacaatctcggctcactgcaacctctgccttctgggttcaagtgattctcctgcttcagcctcccaagtagctgggattacaggcatgcgccaccatgcctggctaatttttgtatttttagtagagacggggttggccaggatggtctcacactactgacctcatgatccacccaccttggcctcccaaagtgctgggattacaggtgtgagcaactgcgcccggccgacacgtctcttctttaagccgccacttattggatctctatgttagagcggcagtctcatatattttctctcatattttcttctccacccctacaccttctgggagttctattttctgggataattaattaattaatcaatttttgagatggggtctcactctgtcccaggctggagtgcagtggagcgatcttggctcactgcaacctctgcctcctgggttcaagctattctcctgcctcagcttcctgtctcaaactcctgacctcgtgatccacctgccttggcctcccaaagtgctgggattacaggcgtgagccaccgcgcccagctttatttattttttaaattttttattcttgagacagagtctcactctgtcacccagggtggagtgcagtggcataatcttggctcatggcaacctccgcctcccgggttcaagcgattttcctgcctcagcctcccaagtagctgggattacagacgcctgccaccacacctggctaatttttgtatttttagtagatggggttttgctacgttggccaggctgatctcgaactcctgacctcaggtgatccgcctgccttggtctcccaaagtgctgggattacaggcatgatccaccacacctggcagttttctgggataatttattaactttttattacaacacttcctgtttgtgtttgtacagatgaggccttgctatattacccaggctggtcttgaacttctggcctcaagccattctccttggcctcccaaactgcaggaattacaggagtgagctactgtgcccagcttctttattctaatgcttttagtaattcagtatcatagctttaatttctaagaattcagtctttgctctatttatttatttatttgagatggagtctcactctgtcgcccaggctggagtgcagtggtgtgatcttggctcactgcaacctcctcctcctgggttcaagcgatcctcctgcctcagctcccagaatagctgggactacaggtgcctgccaccacacccggctaaatttttttttgtatttttagtagagacagggtttcaccttgttggtcaggctggtctcgaactcctgtccttaggtgatccacctgcctcagcctcccaaagtgctgggattacaggcgtgagccactgtgcctggcctctttcttttttataacaccctgtttttattgtaacatagtgtagcaattttttttttctttgagatggagccttgctctgtcgcccagctggagtgcagtagtggatctcggtttaactgcaacgtccgcctcccgggctcaaatgattctcctgcctcagcctcccgagtagctgggattataggcacctgccactgtgcccagctaatttttgtatttttagtagagacagcgattcaccatgttggccaggctggttcgaacccctgaccccaggtgatcagcccacctcggcctccaaaatgctgggattacaggtgtgagccactgcacctggccagcaatatcttttttttttttttttttttttttttggggaaagagtcttgctctgtcgcccaggctggagtgcagtggcgcgatctcggctcactgcaagctccgcctcctgggttcatgccattctcctgcctcagcctcccgagtagctgggactacaggcgcccgccatcacgcctggctaatttttttgtatttttagtagagacggggtttcaccatgttagccagaatggactcgatcttctgatctcatgatccacctgcctctgcctcccaaagtgctgggattacaggcgtgagccaccgtgcctggcccatctttttttttttttttaatatggggtcttgctctgtcacccaggccagagtgcagtggcatgagcacagctcactgcagcctcaaatacccaggctcaagtgatcctcccacctcagcctccagagcagctgaaattacaggcacgtgctaccacgccctgcccagctaatttttttttggaagcagcaccttcatttattagggacttcggtggggatggggaaaggcggcccccgggtcagaggcgccggaagaagagcttggagccgtggtctaacgtgcactcgctggggcccagctggctcccgcccagctctttttttttttttttttttttttttttgagatggagtctcactctgtcgcccagactggagtgcagtggcgcaatcttggctcactgcaacctctgcctcccgggtttaagcgattctcctgcctcagcctcgagtagctgggattacaggcacccgccaccacacctggataatttttgtgtttttagtagagatgaggtttcaccatgttggccaggctggtctcgaactcctgacctcaggtgatccacctgcctcggcctcccaaagtgctgggattacaggcatgagctactgtgcccagccccgcccagctaattttttaattttttgtagagacaggatctcactatgttgccagggctggtttcaaactcctggtctcaagcgatcctcccgctttggcctcccaaagtgctgggattacaggggtgagcctcgtgcctggcctgaagcagcattttctcaaatgtctttaaaaataccagatttttttttttctttttctttttttcttttcttttcttttcttttcttttctttttttttttaagacggaatctcgctctgtcgcccaggcgggagtgcaatggcgcgatctcactgcaagctcactgcaagctccgcctctcgggttcatgccattctcctgcctcagcctcctggtagctgggactacaggcgcccgccaccacgcccggctaattttttttgtatttttagtagagatggggtttcaccatgttagccagaatggactccatctcctaacctcatgatccacctgcctctgcctcccaaagtgctgggattacaggcgtgagcgatcgcacccagcctctttttctttacgtaaattctgtttcctccaggattacttttcttttctttttcttttttttttaaatttttttgaatgtacttaggatgcatttggctacaaataactaaacatccgacttacaggaagctcacagaagggggtggctgggattcagggccccttgatcaggcatttgcgatgccttgggatcccatgctcttcctcccattcctcctctgcaatcctgcaatgtttccatcctggggccagttcctctcagagttacaggatgtatccttaatcatggcttgtgggaggcagaagttactgcccccgggttctcttttaattaaaaggaagaagcctttcttagaagcctcccttccttttatcttagtggctagaactggggcatgtaccctttcctaatgcaatcgtgggcagaaggggagtggttactttagactggtcagactttgctggagctgaagaaggaaggggtcagtgcccaggatgtgtatgctggtgggcacctgaacaaactggggtacttttaggaaagaaggaggcagaatggatgatggggttggtttatcttggtgctttcctttcatgttgcagggtttctttgaatgttgttgatatttcttccaggcgtgacggctcatgcctgtaatcccagcagtttgggaggccgaggtgggtggaatctcttgcgctcaggagttccagaccagcctgggcaatatagggagacctctgtctctacaaaaattagccaggcgtagcggtgtgcacctcccagttttgctgggaggattacttgagcccaggaagttgagttgaggctgtagtgagctgtggtctcaccactgtattccagcctgggtgacagagtaaaaccctgtctcaaaaaaaaaaaaaaaaaaaaggttgatatttctttcaagtcccatcatacttcagagtgagccaataagaggctgactggggcttttggtaccagagtagagctttccaacttgagggttggactttcatatcaagtgtgagaataaactaaagacctatttaggtgcaagattactttgggcacggtggctcacgcctgtaatcccagcactttgggaggctgaggggtgacgatcacctgaggtcagtagttcgagaccagcctggccaacatggcgagaccccgtctctactaaaaatacaaaaattagccaggcatggtggcgcctgcctgtaatcccacctactagggaggctgaggcaggaggatcgcttgaacctgggaggcagagtttgcagtgagccgatattgccccactgcaccccagcctaggtgacagagtgagacaaaaaaaaaaagcaaagttcacctttttattagggagctttctttggatgtgacttgaaaatgtgctcctgcaaaattaagagggtaaatcacaaaagagaagggtgcagactacaggaaataggagatcccacccaagagagaaataaccactggtcccaagatgtagcagtgtagcaacagggagtgggaggggagaaggaaggtcacactggagcaaggaattagtgaagcaattagaaactctaggtaaaattaaaagagatgtattgtagtaaatttactatgatacattatcgtagtaaatatcgctaaaattttatatatatatataaatatatatatttatataatataactgaacaatagttatataatgctttttttttttttctgaggtggcatcttgctctgttgcccaggctggagtacaatggcacgatctcagctcactgcaacctccgcctcctgggttcaagcgatcctcctgcctcagcccccctagtagctgggattacaggcacgcgccaccatgcccagctaatttttttatttttagtagagatggggtttcaccatgttggccaggctggtctcgaactcctgacctcaggtgatccacccgcctcggcctcccaaagtgctgttattacagacgtgagccaccgtgctaggcatttttttttttttttttttagagacatggtctccctttgtcacccaggctgcagtgcagtggtatcatcatagctcactgcagtcttgaacttctgggctcaagtgattgtcccgtctcagcctcctgagtagctgtaagtacaggcatgtgctaccatgcctggctactttttttctttttttctgtacagatggcaccttgctatgttgccccagctggtcttgaactcctgacctcaagtgatcctcctgccttggcctctcaaagtgctgggattacagacatgaggcaccacatccagccccataatcttaaaaacaaagaaaattaatagttttccattttagactcaaactctggaccagacagcactgatcttgactatctgaggtgatagaaatagcctttatctgtgttatttgatttgatagctactagccacatgtggtttctgaacacacttgaaatgtaactagctagttgcaactgagggaactaggttttaaatctcattaaattttaattaagttaaagtagtctcctgtggccagtggcttctacattaggcaatgcagctctaagcaagatgaaagagagaatgccaatattatctacatttaacaacataaaagtaaatgtacaggtaacagaaatgagcagaagagagataaaggaaagccactatcttcatgtcacaaagtgataagaatttaggccagaagctgtggctcatgcctgtaatctcagtacttttggaggccgaggcaaggaggatcgcttgagcccaggaattcaagaccagcctgggcaacataatgagatccctgtctctacaaaaaaaattaaaaattagctgggcatgatggtgcacacctgtagtcccagctactcaggaggctgaggtaggattgcttgggcccaggagttcgagggtgctcatctctttaaaaataagtaaataggtcaggtgaggtggctcatgcctataatcccagcactttgagaggctaaggtggacggattgcttgagcccaggaaattgatctcagcctgggcaacagcgaaacaatgtctctacaataaatataaaaagtaaccaggtgcatgccgggcgcggtggctcacgcctataatcccagcactttgggaggccaaggcagggtggatcacaaggtcaggagatcgagaccatcctggcgaacacggtgaaaccctgtctctactaaaaatacaaaaaattagccgggcatggtggcgggtgcttgtagtcccagctactcgggaggctgaggcaggagaatggcgtgaacctgggaggcggagcttgcagtgagccgagatcgcgccactgcactccagcctgggtgacagagcgagactccgtctcaaaaaaaaaaaagtaaccaggtgcggtggcacacacctgtagttccagctacttggaggctgaggtgggaggatcactggagcccaaggttgcagtaagctgagatcaggccactgcactctagcctgggcgaaagagtgagaccctgtctcaaaacaaaacaacaacaataataaaactcatacataactacgtaaataaagttacaaaagcaactttagttcgttacaaaggacctgaagagagggatttaactgacctgcaaggtggaatggggctggagcagggccagtgggtcagacacctatgattatgccaggcaaaatggatacatgaagaaataaagttatagcatctccatgtagtaatagaaaaaaaaaaggaataacgaaattagcacactttttgggaatgtggacccaccagtagaattgagactagaaaaagttaaaagcattagaagtgttctctttctgagatcatgacttgttggggaaagggaagacttattgttcatgacaaacacttctgtgcttataacatgcattagcttaggaaacagcacttttctttttctctttttttttttttttttttttttttgagacaaggtcttgctctgtcgcccaggctggaatgcatgttgcgatctcggctcactgcaacctctgcctcctgggctcaagcgatccttccaccttggcctcccaaggcgctgggcgctgggattacaggcatgggccaccgtgcccggcctggtgcttttcagtgaataaataagtatgtaaacttctcttttctgactagacggaaattccccagaggacaagggtggcgtgacttgtcagtccttttcattgacagcgctgtggatgggaagaaagggcccctggtcccaagcaagccccagtcctgtggccctggaggatcagaagggtaattaagtgtcaaaggaaaacatagccagacatgagttactgtggtgaaaacagattttattcagtaactactcgtggtaggagaaagagctgagctccattctgatttgtgcagaggtgatttaggcatttaattagttaattagtttttgtgggacagggtctcgatctgttgcccaggcttgtgattgtgcctgttgctcagattgtgcagtggcacaatcatggctcactgcagcctcgaactcccaggctcaagtgatcctcctacctcagcctcctgagttagctgggacccacaggcgtatgccactgcacctggcttttttttttttttttttttttttttgaaacagagtctcgctctgttgcccaggctggaatgcagtggcatgatcttggctcactgcaaccaccacctcctgggttcaagcaattctcctgcctcggtctcctaagtagctgggattacaggcgcgtgccacaatacccagctagttttagtttgttttttatttatttattttttttagtagaaacgacgtttcaccatgttggccaggctggtctcgaactcctgacctcaggtgatccacccacctcggcctcccaaaatgctgggattacaggagtgagccaccgcaccagtgtctctctcttataacaccagctagtccttatcaggctttgactgtgggcccctcacctgtctaacttatccttcccaggaactttgaagaatactattattattcctattttgcaaatgaagaaactgaggcagattaaatgcctgacccaaggccatccagacggcaggcgatgcaggcaggagtcaagctcaggtacccctccccttctgtggcttccctgcctccaggcttctgccagcccctgtctaccttggtgtaggagcggcccctcaaagacctgcagggagccgggcacggtggcgcacgcctataatctcagcactttgggaggctgaggtgggcgtatcatgaaaccctgtctctactaaaaatacagaaattagccgggtgtagtggtgggcacctatgatcccagctactcagaaggctgaggcaggaggaacgcttgagaaccccagaggcggaggttgcagtgagccaagatcgagccactgcactccagcctggacgacagagcgagactccatctcaaaaaaaaaaaaaacctgtagagggaaggaggaactggggcctggggagggcagagctattatctcaggagaagcaggcaaacctctggtgacctctgatgacctcagggcaggatgggcaggccttcacaacagctccaggcacacccagcctcccgtccctggcctcatcactcccctctctgccctccaccctttggcctccttgcctttgtccacagttctgcagcctgataccctcttccttgtctcaaccagagaagtcttcagtcaataaacgtcatccaatgcctactgtgtgtcaagcacttcctgggtgctggggcactgtgcaagcacacacgcacagctgtgaggccatggggctggcattccagtgtggggagagcgacggaagcaaaataagaaagtccattacatggcgcatttgaaggcgcgaagtgctatggggagaaagcaaggaggggggttacagtccagagggaggggggtgcgattttttttttttttccagacggagtcttgctctgtcacccaggctggagtgcagtggcgtgatcttgcaaactccgccgcctgggttcacgccattcttctgcctcagcctcctgagtagctgggactgcaggcacccgccaccatgtccggctaattttttgtatttttagtatagacagggtttcaccgtgttagccaggatggtcttgatctcctgaccttgtgatccacctgcctcagcctcccaaagtgctgggattacaggcatgagccaccgcgcccacccgggggtgagattttaaatacaatggccagctgggctccgtggcacacacctgtaattccagcactttgggagaccgaggtgggaggctcacttgagtctaggagtttgaaacaagcctgggcaacaaagcaagatcccatctgtatgaaaaatttaaaaattaggccgggcatggtggctcatacctgtaatcccagcactttgggaggccgaggagggcagatcacttgagctcaggagtccgagaccagcctggccaacatggtgaaacactgtctctactaaaaatacaaaaaaattgctgggcgtggtggctcacgcttgtaatcccagcactttgggaggccgaggcaggtggatcacctgaggtcaggagttcaagaccagtctggccaacatggtgaaaccctgtctctactaaaaatagaaaattagatgggcttggtggtgggcacctgtattcccagctactcaggaggctgaggcaggagaatagcttaaatccaggaggcggaggttgccgtgagccgagatcgaaccattgtgctccagcctgggcaacgagagtgtgaaactccatctcaaaaataaaaataaaaatacaaaaaattagccgggcatggtggcgcgcacctgtaatcccagctactcgggagactgaggcgggagaattgctggaactcgggaggcggagttgcagtgaaccaagattgtgccactgcactccagcctgggagacagagcgagactccatctcaaaaaataaaaaattaaaattaaaagttagactggtgtggtggcatgtgcctgtagtcccagctacttgggaggccaaggcgggaggatctcttgagcccaggaggtcgaggctgcagtgagccatgattgtgccaatgcactcaagcctgggtgacagagtgagaccctgtgtctaaaacaaacaaataagtaagtaaataggttggccaggcaaagccatcctgagaaggtgacatttgagcaaagactgagaaagcagccaagcaacatctgggtggggagccctggggcagccaccacagatggcgcaaaggccctgggcttgctttctccagggacacatcagaggtccgggtggcaagggcgtggatggcagggccatgggtggaagggcagaagcaacgtggataagagaggtaggcaggggtcagatcggatgtggccaacttggcttctaccctgagtggggtgggagtggtctcagggctccaagcagaggaggggtggggtcagatgtttcatctgggtccctctggctgctgtgtggaaaacagcccggaggaggatgagatctcacacagggagaccagagctgagatgactgcaccagtccaggccagagaagacagaggctcaggccagtaggcagcagtgacggggcgaagagggatcagattctggatctttctctctctctctctctcttttttttttttttttttttttttttttttacagacaaggtatcactgtgttacccagggtggagtacagtggcgaaatcatagctcactgcagccttgaactcctgaactcaagcgatcccttctcctgagtctcccaaagtcctgggattacaggagtgagccactgtgcccagggcaggttatacattttttttgggaacaccacagaagccaagcacagtggctcatgcctgtaatcccaggacttctggaggcgaagatgagaggattgcttgagcccaggagttcaagaccagtctgggcaacacagcaagaacccatctctaaaaaaaaaggaatactgctgggcacggtggctcatgcctgtaattccagcactttgggaggctgaggtgggtggatcacctgagattaggagtacgagaccagcctggctaacatggcgaaaccccatccctaataaaaatacaaaaattagctgggcatggtggcagggacctgtaatcccagctattcaggaggctgaggcaggagaattgcttgaacccaggaggcggaggttgcagtgagccgagatcacatcactgcactccagccagggtgaccatgcccagccaactatgtaaatatcctatacacacacactcttctgatttcaccaatggttttaacactcactcttacctgaatccattattattatattggttatgtttatcattttttaaattctacattccttttacaattgttagctttcctacagtaaaataactttccagtggccgggcacagtggctcatgcctgtaatcccagcactttgggaggccgaggcaggtgaatcacgaggtcaggagttcgagatcagcctggccaacatggtgaaaccacatctctactaataatgcaaaaattagccaaacgtggtggtgcgcacctgtaatcctagctacctgggaggctgagggaggagagttgcttgaaactaagaggcggaggttgcagtgagccgagattgcatcactgcactccagcctgagcgacagagcaagactacatctcagaaaaaataaaacaaaaacaaaaaaaacttccatactgtcctacctcccttccctgctccctccctccttctctttgtctctaatattttcagaatcagtatgaactcattttcttttcttttttttttttttccaagacaaattctcactcttttgccgaggctggagtgcagtggcatgatctcagctcattgcaacctctgcctcccaggttcaagcgattctcctgcctcagcctcccgagtagctgggactaccggcgcccatcaccacacctggctaattttttggtaatttttagtagaaacggagtttcaccatgttggtcaggctggtctcgaactcctgacctcaggtgatcctcccgtctcggcctcccaaagtgctgggattacaggcatgagccactgcgcccagcctctttttttcttttaattaaaacaattaaatagagatggggttctctgtctgttgcccaggttggtcttcaactcctgggctcaagcaatcctcctgtctcgggctcccgaagtgctgggattacaggagtgagtcaccacgcccagcctaagtattgctcttctgtgatgatttgcaggcaacaatcacctcttgttcatattttcattatctttccctccaccccgagcctatagtctgtcttggtcagaccccatttcttgagtgcaccaggctggagtttggacccatccacatcctcgcagctctcctgagttggggcccaacatctggcttggggaacagacagctttgccgacagcagtaacaatttggttgaaatgataactttgtcaaaaatgaattttgccttagtgtttttttaaaggttgagaatcttgtacattcttacaacatttctattttctacagttaaaaaactgtaggctgggtgcagtgactcactcctgtaatcccagcactttgggaggccaaggtgggtggattgcttgagtccaagggttcgagaccagctaggcaacatagcaaaatattagctaggtgtggtagctactcgggaggttgaggcaggagaattgcttgaacccaggaggcagaggttgcagtgagccaagatcatgccactgcactccagcctgggcaagagagctagattgtctcaaaaaaaaaaaaaagtaagttccaattactttgcagccaattattcttgctcttctatttgcaatagcagaagattgaaatagcctcctagatgtctgacagtggaatgggttcttttctttttcttttttggtagagatgagggtctcactatgtggccaggcaagccttgaactcctggcctcaagtgatcctcccgcctctggaggcaggaggtagggtacagtcccagactcaaagcactgggattacaggagtgaaccactgcgtgagcctggtttcttttctttcccctccctcccttccttccttccttccttccatccgtccttccttccttccctccttctctcctctttcactctacctctttcttttcttcttttttctggcttgttaaaacagaaatacataataattatagtgaaataaactagggtatttactgcagcagttagtaataatgaaatgttggaaaacaatctaatgttcatccgtagggaatatttaaaatatagtgtatttctgccgggcgcggtggctcacgcctgtaatcccagcactttgggaggccgaggcaggtggatcatgaggtcaggagatcgagaccacggtgaaaccctgtctctactaaaaatacaaaaaagttagccgggcttcgtggcgggcgcctgtagtcccagctactcgggaggctgaggcaggagaatggcttgaacccgggaggcggagcttgcagtgagcagaaatcgcgccactgcactccagcctgggcgacactgtgagactccatctcaaaaaaataaattaattaaaaataaataaataaataaaatatagtgtatttctggccgggcgcggtggctcactcatgtaatcccggcactttgggatgctgaggctggcagatcacaagatcaggagatcaagaccatcctggctaacgcggtgaaaccctgtctctattaaaaatacagaaattagctgggcatagtggcatgtgcctgtagtcccagctacttgtgaggctgagacaggagaatcgcttgaacctgggaggtggaggttgcagtgagctgagatcgagacactacgctccagcctgggtgacagagcaagactccgtctcaaaaaaaaaaaaaattatagtgtatgccatggaatattatgcaactgttatatatgtgtgtgtgttcccaaagcattgttcagtaacaaaggaaaagtgcaaaacactaaaatggatgaatacatgcttgtgtaaacacagacactgtcaggaatgtttgtctggaggtgatgggtatggagcctttttgtctgatatattgggtgtatcaagaatgccaggtcctgagcagttttttttttttttttttgagttggagtctcactctgttgcccaggctggagtgcagtggcacaatctctgctcactgcaacctccacctcctgggttgaagcgattctcgtgcctcagcctcccgagtagctgggattgtaggcgcccgccaccatgcccagctaattttttgtgtttttagtagagacggggtttcaccatgttggccaagctggtctcgaactcctgacctcaggtgatctgcctgcctcggccttccaaagtgctgggcttacaggcatgggccaccgtgcccagccgtttatatgtattaactcttaatcatcaaaacaaactatgtggtattaccataattatcgccatttatacaaagcaacagagggataaggagattaaggcacttgcccaagtgcaagaggtaggacaggaacccagagtcccgtgctggtagctgcttttctgtgcacttaacattatctcatttaattcttgcagtcacttcatgaagaaggtggcggtcctagggcattggagaagttatgtgcttgttcaaggtcatgcagctggaagatggtggtggtaggacaggaagtctgtagggcctgattctgcagccctctagtctatactcctttgctcctgtgtccctcatcccccctgcagaatgggcaccccgttacctttctgagccactgtgcgcagaaaagagagcatgttggccaggctggtctcgaactcctgacctcaagtgatcagcctgccttagcctcccaaagtcctgggattacaggcgtgaaccaccacgctcagcctctgaatactttgtactcaagccatttttcagtgctgtgtttgcagtgagcacacccgagggatgaagacacgtctccctgtgggaacctgggcttaccagggcccctagaggaggggaatctctcaagctcagagctctatggctgcggtgcaggcccactgtgtgcatggtgtcagtctgggcccttccatgttgcccccgtgggacttggggtaaggggaactgatgcaaacatcacgctgctgttgcttggtgtgagcaattaattcctgtggctctcacccaggagtctcatgtctttgggtcagacaaactcatcagcttgtagaaatggcacagtcccacgggcctgttagaatcttctattgtgcacatgttgctcttaaaatatacaaatcagttttgattttaaaaaattatttatttttttagtgataggagttttgctacgttgcccaggctggtttcaaactcttgggctcaggaggtcctcccactttggcctggactgccagcataatgtatcaccacacccgggactgattttcgtttttcaagaacaaaaaccaaaaacatacacaaaccgagagtcaaagcttgctaattagaggaaagtcaggaaatgggaaccattcaaagaagaaaatacccccacctcctactctcacctatccaaagacaattaggtgaatcccttagtagatatctttccagacggttttccatatagattcccatatctggccaggcgcggtggctcacacctgtaatcctagcgcttggggaggctgaggcggatggaccacctgaggtcaggagttcgagaccagcctgaccaacatggagaaacctcgtctctacgaaaaatacaaaattagccgggcacagtggtgcaagcctgtaatcccagctactcaggaggccgaggcaggagaattgcttgaacctaggaggcagacattgtgctgagccgagccaagatcatgccattgcactaaactccgccttaaaaaaaaaaaaaaagattcccacatctttactagtttgcagaaataagatcctagcatatgcagtgtgtaggaaccaccttggtttagccacgtctctgtgactgggggccactgtggtgacccccagctccccggacagagtcaagagctcaccagcctgcaaaggttttcacggcccccagccagactcgggggcttcctcttgccctgctacttcctgggagctctgagggcaggaaatggcgccactcagctcctggcctaacagcttggggaccacaaatgcaaaggaaaccaccctcccctcccacctcctcctctgcacccttgagttctcaggctcacattcccaccacccacctctgagcccagccctccctagcatcaccacttccatcccattcctcagccaagagccaggaatcctgattccagatcccacgcttccctgcctccctcaggtgagccccagacccccaggcaccccgctggcccctgaaggagcaggtgatggtgctgtcttcgcccagcagctgtgggagcaggcgggtggggcaggatggaggggtgggtggggtgggtggagccagggcccacttcctttccccttggggccctgtccttcccagtcttgccccagcctcgggaggtggtggagtgacctggccccagtgctgcgtccttatcagccgagccggtaagagggtgagacttggtggggtaggggcctcagtgggcctgggaatgtgcctgtggcttgaaaagactctgacaggttatgatgggaagagattgggagccattgggctgcacagggtcagggaaggccaggaggggctggtcactgctggaatctaagctgctgaggctggagggagcctcaggatggggctgatgggggagctgccagcatctgttcctctgtcatttctgataacagtaaaagccagcatggaaaaaaccgttaaaccgcaggttgggcctggccgttggcagggaagtgggcagaggggaggcccggccaggtcctccggcaactcccgcgtgttctgcttctccggctgcccacctgcaggtcccagctcttgctcctgcctgtttgcctggaaatggccacgcttctccttctccttggggtgctggtggtaagcccagacgctctggggagcacaacagcagtgcagacacccacctccggagagcctttggtctctactagcgagcccctgagctcaaagatgtacaccacttcaataacaagtgaccctaaggccgacagcactggggaccagacctcagccctacctccctcaacttccatcaatgagggatcccctctttggacttccattggtgccagcactggttcccctttacctgagccaacaacctaccaggaagtttccatcaagatgtcatcagtgccccaggaaacccctcatgcaaccagtcatcctgctgttcccataacagcaaactctctaggatcccacaccgtgacaggtggaaccataacaacgaactctccagaaacctccagtaggaccagtggagcccctgttaccacggcagctagctctctggagacctccagaggcacctctggaccccctcttaccatggcaactgtctctctggagacttccaaaggcacctctggaccccctgttaccatggcaactgactctctggagacctccactgggaccactggaccccctgttaccatgacaactggctctctggagccctccagcggggccagtggaccccaggtctctagcgtaaaactatctacaatgatgtctccaacgacctccaccaacgcaagcactgtgcccttccggaacccagatgagaactcacgaggcatgctgccagtggctgtgcttgtggccctgctggcggtcatagtcctcgtggctctgctcctgctgtggcgccggcggcagaagcggcggactggggccctcgtgctgagcagaggcggcaagcgtaacggggtggtggacgcctgggctgggccagcccaggtccctgaggagggggccgtgacagtgaccgtgggagggtccgggggcgacaagggctctgggttccccgatggggaggggtctagccgtcggcccacgctcaccactttctttggcagacggaagtctcgccagggctccctggcgatggaggagctgaagtctgggtcaggccccagcctcaaaggggaggaggagccactggtggccagtgaggatggggctgtggacgccccagctcctgatgagcccgaagggggagacggggctgccccttaagtgtcggtgaatagtgaggctggaggccggaatctcagccagcctccagcaccttccctctcaccatcccactgccccctcgctcccatgtttccacccggcaccctgatcctcacccgaatctcctttttttttttcttttgagacagagtttcgctttgtcgcccaggctggagtgcaatgcacgatctcagttcactgcaacctctgcctcctaagttcaggcgattctcctgcctcagcttcccgagtaactgagattacaggcacccaccaccatgcccagctgcttttttgtatttttggtagagatggggtttcaccatgttggctaggctggtctcaaactcctgacctcaggtgatctacctgcctcagcctcccaaagtgctgagattacagacatgagcctccgcgccttgcctcctcacccacctcttcactctgaatcctcatgaggcttctcagccctggatttcctgctgccatcctcacccagcacccacaactagcgcctgggcagggcagggctggcacctctcaacgtctgtggactgaatgaataaaccctcctcatccacccctatttatctccatcaccatttccccctctttcttgttcctggaaacggctgctgagtctccatcggccaaacttatctgccctgtgatttctttgacaattctccttttcccccagaacccaccctgggttgaccagagtctgggaagaaggacaagagaacccggcaaactccctcctaggattaactttgtaaagcacccttgccctgtagctgcaagggctgtggaacctgggcagcccgcaaccacctttagctctgggccccccaggccagcctggagcatggctgggtggggccaccagcccatgctctcaggcgggcctgtgatctttcccagggcacatggactgtaggctggccctggcccacaccaccacactctccccagccatggacagaggcagccagaggcctcacggtttctcctccgagtttctggctgggtgtagttctcagaaaccccagtgcctgcgtgtgtccactcgtgggtgtggtttgtgtgcaagagctgaggatttggcgatgcttgggaggggtagttgtgggtacagacggtgtgggggtgggaagtggtgcagagactgaagagggtcaacctgggcatgggggacacagggactgctgagaacgtgcgtgtcatctttgctctgatggggtggacatagcagaaaatctaactctgtctgtagccccatacagaatgccagggtgagcacagtggctggtgcctttaatcccagcactttggaaagttgaggcaggaggatcgcttgagcccaggagttcgagtctgaagtgagctgtgattgcaccactgcacttcagcctgggcaacagagtgagcccctgtctcaaaaaagaaaagaaaaagaaagccaggcttcatggaaagatcgtatgtgtgacccaaatatgagttcttcagctcagccatggtaatcccttccttgaagtctccatttctgcagtacacatgcatgtgcgctctctctctctctctctctctcacacacacacacacacacacacacacacgcgcgcgcgcgcgcgctctcctgcgaacagaggcagggggagaggggtttgccctggtctcggggactggtctggctggcgcttccccactgcacgtttccaggtttagtttgtctgtgtctcctcttccatcccaggggctgagccccttccatcctccaagaggaaccagtgagagtgagtgaaggaggggcctggagccagggacttcccctgtggggcctgggtggagaggggagaactcaatggtgctgcctttgagaccagcccaggctacagcccaggagcacacatgggccagggcagttggtatttcccgaggacaaagaggaaattttcaaagaggaagttgttgagttagagcttgcggtggctgagagcagacaggttgacctgcaaaaaaagacaggggaggcatgtgagtgtgacagccctgctctgtggcctgggcaggagatgggggaaagggtcaggtgggggatgggctcgtgcagtgggagaggagacggagggagggagcgggaaggggcttgcttagtgggtgggaagagctgagctcggatggaaccagcttctaccagccaggctgggcacccactgggctgcatctggtggccttttctgattgctatttggactcactgcagctgcagaatgacagaggccatgtccaaaatcccttagagacactgttgtcttagagttgttaaaataagagcccccatatcaggtttagaaaatactgtcaccgaacgaacgtcgctgtcctcagctccacctccctttcctttgacagatatggttgttttctaagccaggactggttttagtcaggtcctgggcgaatcctgaaaaaaagaggtagtacgggtaaggaaggcacccaacagggctttcacaatccagaaaatatcaaaatataagtgttaaaagagaggcacaggccgggtgcggtggctcacgcctgtaatctcagcactttgggaggccaaggtgggcagatcatgaggtcaggagtttgagaccagcctggccaatatgatgaaaccccgtttctactaaaaatacaaaagttagccaggcatggtggtgtgctcctgtaatcccagctacttaggaggctgaggccagagaattgcttgaaccctggagtcagaggttgcagtgagccgggatcatgccactgtactccaggctgggtgacaaagtgagactgtctcaaaaaataaaaataaataaaataaataaaagagaggcacaaacagtgttatgaatgcaccaaggaaaatggtgcattcataactctcaggtgaagcctaccaagccatgcgtgtgtgcacatatgtgtgtacgtgtgcatgtgcgtgcgtgcatgtgcgtgcgtgcatgtgcctgtgtgtgtatgtgtgcacatgtgtgtgcgcatgtgtgtgtgtgcgcgcatgtgtgtgtgcatgcatgttctcccatgcatgtgtactgtggcaagggagactttgaggaagagattccagtggctgagcagaagggctcgcattgccctggcgaaaggttggaaggcttcacctgagagtgtgtcgtggcctttgtcatatccactgcttgattcctttctttaaaaattatttttattgttttctacatatgagaaccaccacacctggctaatttttgtattttttgtagagatggggtttcaccatgttgtcccggctggtctcaaactcccgggcacaagagatccacctgcctcagcctcccaaaatgctgggactataggcatgagccactgcacccagccactgcttcattcctggtggctgctgtgcctggcatgttgcagatcctccatgaatatgcatttgaatgaatgaatgaatgaatgaatgaatgaatggagatgacgcctcagagattctttcttttgagatgaggtctcattctgtcacccagactagagggcagtggtgcaatcacagctcaccacagcctcaacctcctgggcctcccaagtagctgcgatcacaggtgtgcaccaacatgcccagctaatttttttttttaatttttaatttgtacagacagggtcttgctgtgttgcccaggctggtctcaaactcctgggctcaagtggtcctcccacctaagcttccccaaatactgggattataggtgtgagccactgtgcccaggcttgcctcagatatttgaaggctgggaaggattttgcaaagctgggaaaaggaaaaggcattcccagcagaggggatagcaggtggaaatacataattaaaaaaaaaaaacgtggagcagatccagcgcagtggctcatgcctgtaatcccagcactttgggaggcagagcagggaggattgcttgagtctaggagttcaagaccagcctgggtaacatagaaagaccctgtctctacaaaaacacaaaaaattagccaggcgtggtggtgcatgcctgtagtaccagctacttgagaagctgaggcaggaggactgcttgaagccaggagtttgagaccagcctgggcaacatagtgagaccccgtgtctacaaaaagtaaacatttatatatatattttttaaagtggagcagttcaatatagagtcttttttgaacaaacgtgaaatagatgtcttttttttttttttgagatggagttttcactcttgttacccaggctggagtgcaatggcgtgatcttggctcaccagaacctccgcctcctgggttcaaacaattctcctgcctcagcctcccaggtagctgggattacaggcatgcaccaccaaacccggataattttgtatttttagtagagatggggtttcaccatgttggtcaagctggtcttgaactcccgacctctgctgatccgtatgcctcggcctcccaaagtgctgggattacatgcgtgagccaccgtgcccgacaatagatgtcttttaattttctggaggaaaaagcaaagcaaaagaagcagtggatattttaagactaaaaaggaaaacaaaaaaaggagatagagcaggccagacgtggtggctcaacgtctgtaatcccagcactttgggaggccgaggcaggtggatcacctgaggtcaggagttcaagaccagcctgaccaacatggtgaaaccctgtttcaaaatacaaaaaattagctgggcgtggtggcgggcacctgtaatcccagctacttgggaggctgaggcaggagaatcccttgaacccaggaggtggaggttgcagtgagccgagatcacgccattgcactccagcctgggcgacaagtaaaaaactccatctcaaaaaaaaaaaaggagatagagcaaggaacagtaagaaaatagttgggtgcagtggctatgcggtggcactataggaggctgaggcgggcagatcacctgaggtcaggagttggagaccagcctgggcaacatagacccctatctctacaaaaaatttgaaatatgaaaaattagccaggtgtagtggtgtgcgcctgtggtaccagctactcaagaggcgaaggcagggaagattgcttgagcccaggagtttgaggctatagtgagctgtgatcatgccactgcactccagcctgggcaatagtgtgagactctgtctcaaaagaaagaacatggccaggcgtggtggctcacacctgtaatcccagcactttgggaggccgaggcagtcagatcatgaggccagtttgaaaccagcctggccaacatggtgaaaccctgtctctactaaaaatacaaaaattagccaggcgtggtggcatgcccccgtaatcccagctacttgggggtctgaggcagaagaattgcttgaaaccgggaggcagaggttgcagtgagccgagatcgtgtcattgcactctagtctgggcgacagagcaagactccgtcttggaaaaaaatttaaaaaaagaaaatataaaatatggtataagattaaatatattagttatgaaaataattgtaaatggcttattgaacttatagtcagtaaaaatcatgtttttgaaaattatgtaatgactttggaaaataccagcaatataatgttaagtggggaaaaaagcaagttactcctctgtaatacatatgattttagttttgtaataaaaattcccaaccatatatgcacttatagggaaacaaaggacccatcgcaaatgttttccatgctgatctccaaagtggtgagtttatgtgtgatttttattttgtttatgctcttctgtattttccgaatttcatacaataaatatctgttacttttacaatatgaaaaaatagtggtcaaaaaggtgttcaagggggtggcctgggggtgtctggtttgaggagagtggtaggggatgaggctgcaagtggaggttggagccatgctatgaaaagttcaagagtttgaattgagttctgaggtttgtttttgtttttgtttttgttttttgagacggagtctcaccctgtcacccaggctggagtgcagtggcacgggttcatgccattctcctgcctcagcctcctgagtagctggaaccacacgcgcccgccaccacaccaggctaatttttttgtatttttaggagagacagggtttcaccatgttagccaggatggtctcgatctcctgacctcgtgatccacctgcctcggcctcccaaagtgctgggattacaggcgtgagccacagtgctctgcgtgagccatagtgctctgctgagagtttgaattgcattctggaagtagtggtgaaatcaacacacctaagtctgctcttctcctctcttctagtccccagagtggtgagtagcatcgttctggtggcccaggcaaaacgccttaggaccaccgtgcagccccactctttccccattcctgctctccaggtgccaagtccctggctcttcttccaccgacccttgcatcccttccttctcttcagtcctcatcgcacctcaccgggatcctattgacacttcccctttgatttccttccgctctctgctagtgatggtcccagggacccttctaaaaggtcactgtgggctgggcacagtggctcacgcctgtaatcccaacactttgagaggctgaggtgggccaatcatctgaggtcaggagttcgagaccagcctggccaacatggtgaaaccccatctctactgaaagtacaaaaattagccgggcgtggtggtgtgcacctgtagtcccagctactcgggaggctgaggcgggggaattgttggtccccgggagatggaggttgcagtgagccaagatcgcgccgttgcactccagcctgggtgacagaatgagactccgtctcaaaaaaaaaaaaaaaagaaaaaagaaaaatagctgggcatcgtggcacacacctgtagttccagctactcaggaggatgaggtaggaagatcacttgagcccaagaggtccagactgcagcgagtcatgatcacaccactgcactccagcctgcgtggcaccctgtctcaaaatataataataataaaatttaaaaataaaataaaacgctgctctgtctaggtgatattcctctatccccaaggctgtcagggtggaaccctccttccttagcgtggcatataagcccctcgggacctggccctatctctcctctgaccacccctgcccggtcagcccttgttacagacagtctgtgctatccagccccatcaaattcctgttgctccctaaatatgccacacactttatttggaggagaggggtgaagaagggtagtttaacatgttcaaaatatttattttttccagacagtaaaataacattttttcctgttttgcaaaagttaattatcagcacattgaagattttccttttttttcttttctttttttttttttttttgagtcaaagtcttgctctgttccccaggctagagtgcagtagcgcgatctcggctccacctcccgggttcaagtgattatcctgtttcagcctcccgagtagctgggactacaagcacatgccaccatgcccagctaatttttgtatttttggtagagacggggtttcacaatgttggccaggctggtcttgaactcctgacctcaggtgattcacccgcctcaccctcccaaagtgttgggattacaggcatgagccactgcgcccggccagcagtcttaaataacagaattcacacacacacacacacacacacacacacacacacacacgcactgtattatatttcatcttatactttaaaatgtttccttttttttcctcaaaagtacacattaagatcatgtttacaaataaagccttgtcatccaaagtgaaaaatccagatggcaagatttggatggggaaggtcttgagaaatctgcgaatggagttcacttttgcagacaggaaatgggccctaatatatggttctaaggacattccatttctgaaaatgtacatttccacccgcttttcctctccttccttcctccctccctccctccctctctctctctctctctctctttctttctttctgacaaggtcttcctctgtcgctgacgctggagtgcaatggtgcgatctcggcccattgcaacctccgcctcctgggctcaagtgatcctcccccctcagcctcccaagtagctgggaccacaggcacacgccacggcacccagctaatttttgtattttttgtacagatgggttctcaccatgttgcctaggctgatcttgaactgctgggctcaagtgatcctcccgcctcagcctctcaaaagtgctgggattacaggcgtgagccaccgcacctggcctgcatccccatttctgacccttgaccatgttcaagtgggaaggggaagccggggaagggaggacgggctacctgagggctgcgggtagaggtgactcctgtgagctgtgagccctcagcccttgggcagagggaacagaacagaaacagaccccatctctgagccaccaagctcagactcgtgtggcaggagacagatcacacaacactatcaacaaaacaacacaggtcgcagtggctcacacctgtaatcccagcactttgggaagctgaggtgagaggattgcttaaccgcaggagttcgagaccagtctggccaacatagcgagaccccatctctcaaaaaaagaaaaaaattagctgggcctggtgatgcacacctgtagtcccagctacttgggaggctgaggtgggaggacagcttgaaccagagaggtcgaggctgcagtgagctatgattgtgccactgccactgcactctagtctgagcaatagagtgagaccctgtcttccaaaaaaaaaaaaaaaagagagagagagagagaagaatataatcaaaagtttctaaattcccaaagtagtaacaaaagcagacccaaacaaaagtagagagaaaatcttcgaaacttaaaaggctatttaggctaaggagcccacccagtggtgaccacctagttctgggaggtttggggcagggccattagacaatggaaactcaggttattttggagacaatcaacttgctcccaaaaatgagctgcaagcaggtgcctgtgtgctcagcccagtctggagctcagagcctgcctgccccactgcaccatcaccagcccagctgaaccagggtcccaggcaagccgtacaggctctgcgttggccttggagagaaccgccgactcccccgagttgcctgagctcggcctgaagccagccctccccacgctggctcacaataaatgccttgacttcccgccaactcttcctcaaccattaagattcagctcaactgtcacgggctctgtgcagctgccctcgctgccccaccccacgcagactttgtgttccttctccactcctgcagcaccccttgcgacagcatgaataacccggctgtagtgatgtgagggtgacactcatcaccagtgtgtgagcccctccaaggccacatgtcctctttgtgtttccagagcccagggcccagcatgcggtagctacctagtatatgtttactgaatggagggatgaataaattcatgcacaaagaatagttttatttatttatttatttttgagacagagtcttgcttctgacacccaggctgtagcgcagtggtgcgatcttggctcattgcaacctctgcctcccaggttcaagcaattctcctgtctcagcctcccaagtagctgggattacaggcatgcgcgccaccacgcccggctaattttctatttttagtagagacgaggtttcaacatgttggccaggctggtctcgaactcgcgacctcaggtgatctgcctgccttggtcttccaaagtgctgggattacaggtatgagccaccgcgcctggccttatttgtttattttcataaacaaatttctgttgcccaggctggtctcaaactcctggcctcaagtgatcctcctgcctcagcctcccaaactgttgggattacaggcacaagccacagtgcctggcccagttctgtcctttgagttgacctggtcatccaggaggatgttctgaggaagtgtgaaatgataatattattctagcccacgctggatacagtggcagtctggaaggtgaaagaggttgggtttgaaatagatttattggccaagtgcagtggctcacacctgtaatcccagcactttgggaggccgaggcaggagaattgcttcagcctttaaacatggcgaaaccctgtccctattaaaaataaaaaagttcgatgggcgtggtggcattcacctgtagtcccagctactcaggagggtgaggcaggagaatcacttcagccctataggttgaggctgctttgtgctgtgatcatgccaatgcacgctagcctgggtgacacagtgagaccctgtttcaaaaacaaaaacaaaaacagaatagaggcctggagcttgagagggaactcaggatagaagatatagatttaagagtcggctggatgcagtggctcaaggctgtaatcccagcactttgggaggctagggtgggtgtatcacttgaggtcaggagttcgagaccagcctgaacaacatggcgaaaccccatctctaccaaaaataacaaaaactagctgggcatggtggcatgcgcctgtaatcccagctacttgggaggctaaggcaggagaatcacttgaacccgggaggtggaggttgcagttagccgagattgtaccactggattccagcctgggtgacagagtgagactccctctcaaaaaataaaaataaaaataaataaataaataaataaataaatagtgatacagatagatagatacataaattatatcattcactgggtagattgagaagagagctgtagagagaatctgagtgtaatagtcagggcaggctaactgctgtaagaaacagtgcccccacatctcagcggtataactcaaaagaagttttttccttcttatgacagtcaattcctgacatctggagcatgacctttcacaacattattccgggacccagtctccttccatctagtggctctgtcatcctcctagggccttggagtggtctgcttttgaccagctaatgggaggggagaggcagaataggatcctgtgaagacttctagggtcaggtctggaaatatcttttgctcacactccattggccagaacaagactgcctcagtgcagaggaagctgggaaatgtagtttagtagggtacccagaaggaaaagggaaacagtctctgccacactgaagcaacaccaaaatctgagggttggatgtaggaagaagcacctgcaaaagatagaaaagagcctttaagaggatcacctgaagccaggagtttgagaccagcctgggcagcatagcaagatcctatctgtacaaaaaataaaaataaaaaattagcctagggtggaggcatgcacatacagtcccagcaactcaggaggcttggggccaggagtttgaggctgcagtgagctttgattgggccactgcactccacttaagcctgagtgacagagcaaaaccctgtatccaaaaaaaaaaaaattaaccaggagaaaaatgacatttggagatcctgtctctaaagaaaaaaaaagctcactgcatagctcactgcagcctcagaaacaggcccaggactgaatcaaggccagcaaggtgctggggtgataagcgagcccgactccagcctggccaacacggtgaaaccccttctctactaaaaatacacaaattagctgggcatggtggcagacgcctgtggttccagctactcaggaggctgaggtaggaggatcacttgagcctggggcgtggaggttgtagtgggccaagattgtgccactgcactccagcctgggtgacagagcaagaccctgtctcaaaaaaaaaaaaaaaaaaaaaagtgagctggaggatgaggcctccctaaattttgtgccttgggtgtctcgatccgtcacgccagccccagtcccggcagtcaggtgcggcagagaaagcaaagggagaaggctgggaagatgcaagtgaatttagcgactagcagtccctgtgagcaactgtagcaagaagggtttccaatgaagaaaggaaggccctgggccaggcgcggtggctcatgcctgtaatcccagctctttgggaggcagaggcgggtggatcacctgaggtcgggagctcaagactagcctgaccaacatagagaaaccccgtctctactgaaaaaaaatacaaaattagccgggtgtggtggcgcatgcctgtaatcccagctattcgggaggctgaggcaggagaatcgcttgaccccgggaagcggaggttgcagtgagtcgagatcacgccattgcgctccagcctcggcaacaagagcgaaactccatcaaaaaaaaaaaaaaaaggaagaaagaaaggccctggcagttcttggacaggaacttgcctgaagtcccagtcccggtgactggtggtttccccactttctggttcagaagctgggctctaagctgtctgtgcccttaaagttccttggaaagagggaagggaagggaagtggatattaggtgagttcctactctgtttcatttgcagagttttctcattgattctcagttggacccatgaggtagatgttatgccattacattttttttttctttagagacagggtctctctctgtcactcaggctggactgcagtggcacgatcacggctcactgcagctttgaactcctgggctcaagtgatcctcccatctcagcctacaggtgtgcaccactgtacttagctaatttctttttcttttttctttttttgggagagatgggatctctgtatgtctctatgatgcccacactggtctcaaactcctggcctcaagcgattctcctgccttggcctcccaaagcacagggattacaggcatgagtcgctgtgcccagcctgttatgccgggtttttttgttttgttttgttttttgagacagagtctcgctctgtcgcccaggagtacagtggcatgatcttggctcactgcaagctccacctcccgggttcacaccattctcctgcctcagcctcccgagtagctgggactacaggcgcccaccaccacacccggctaattttttggttttttagtagagacggggtttcaccatgttagctgggatggtctcgatctcctgacctcgtgatctgcctgcctcagcctcccaaagtgctgggattacagtcgtgaaccactgcatccggcctgttatgccgttttttaaattaattaataaatttatttatttatcttgagacagagtctcactctgtcacccaggctggagtgcagtggcatgatctcgactcactgcaacctccacctccggggttcaagtgagtctcatgcctcagcctcctgagcagctgggattacaggcggccgccaccatgcccggctaatttttgtatttttagtagagatggggtttcgccatgttggccaggctggtctcaaactcctgacctcaggtgatcaacctgcctctgcctcccaaagtgctgggattacaggcgtgagctcctgtgcccggccctgttatgccattttaaagctaaggaaactgaggcacagaaaaaggtaaaaaggtacttgagatcaaaaaggatggagttaggatttgaacccaggtccagggcccatgattttcccagcacaccatccaaaatgcctgcctgccctcaccagggagcacatgcttacattcacagccttggaccctgggttagggccaggagggctgggtgttgggtgagaacagggcctcgggctccttcactggctggggcagggcttctgagttccccatcagagcccctcctctgactttcagggcctgctgaggaatctgcaggcctggcagaggacaggagggaggcttggggagcctgggaagggccggctgacagcttgatgggccctccctccctccacagtcccacccccagcctggggcctctgggagccttggtcctgagcagccaacacaccagcccagacagctgcaagtcaccatggacgctgaaggtaaagggacactctctctgccatgtccctgcacccatccccccactgcctacccctgcccccaccctggcttgtctcagccccttgttgcctcctctggagtcatctctcctctggtcccgccatcgactcccttacctaccccatgtccctgcagccttgctcaacccccagaggccccttctcactcttctttctcctgtgttgagtccccaaggagctctggggaaggaaggggcttaagccctagaaaagggcagggtggcctggaggaggtggcgtctcctgggggcagtgggggccggaagtgggaggctggttgggggagcagcatggacttctgctctcgctggtagctcgggagaagcagagacaaagtcctgtcccttctgcagctgggtgggggagggggcttgagtcccgtgattccctgcctggagggagctgtatgcaaactgttggggtgatcagtcccaacccccaaccatgaagtccggtggcaacaaaggaatgagaaaagacaagttaagatttaaagcagccccagggggccagttgctaaagtgaaggctgcagagccctggttgcctgataatttattgagtacaatcttttgatctaagaagcagatggtacggggtgaaacggtgaaggtgggggtgtgcgcgtcatttgaaagatgtatagccgtggtggtttatgtgaatttcctttaagctcaaagcatatgtctaactactaagataatcttttttttttttttttttgagacggagtctcgctttcccccaggctggagtgcagtggcgtgatctcggctcactgcaagctccgcctcccgggttcatgccattctcctgcctcagcctcccgagtagctgggactacaggcgcccgccgccacgcctggctaattttttgtatttttagtagagacggggtttcaccatgttagccaggatggtctcatttcccaacctcgtgatccgcccgtctctgcctcccaaagtgctgggattacaggtgttagccaccgtgcccggccaactaagataatctttaacttattgggctgcagctggtgggagtgggttttacaaggagccaggatgtctggtcacattccaacgcttcaaggaagtgtttcagcccagagcattctgtgtaaagccgcagagcaggtcatgttcactggcctggggacacaatggcaataaggaggtgattctcctcagaggccccctatggtgttccataggtgtcctacacaggggtggctgactaaactggcgccccgtaaacccttccaccagcacaaacccaggggtccatgctctacgctcagaaggctccaccagggatggggctgtgtgaccatgggtgggtcctggcttctcagagtcccgttttcttccatctgtaaaatgacaataatagttccctgctctggcccgccacggtggctcacgcctgtaatcccagcactttgggaggctgaggtgggtggagcacttgaggtcaggtgtttgagaccagcctggccaacatggtgaaaccccgtctctactaaaagtacaaaaattagccgagtgtggtggtgcgcacctgtaatcccagctacatgggaggctgaggcaggagaattgcttgaaccccagtggcggaggttgcagtgagctgagaccaggcctcagcactccagcctgggcgacagagcgagactccatctcaaaaaaaaaggaaaataaatagttccctgctcagaaggttgtggggaggacagaggatgggaggcacaggtgcttagaccctcctccatgtttgaggtgcctgctggccccatacacccggtccctctggctccactgtggaaccagctctcaggggtcccatgcaggatgccacgccaaacacctttcaatctccattgtgtctttctcttttgaaacaacgccgacctggatgtgaatcctgactgccactcagcagcagtggaaaccctggcaagttttgtaacctgtagaagcccgtttccacatctggacaatggagttggtggcactggtctcacggggttgtaatgaagattaaataccttagcagatgtcaaggggtctcgacctgattccttcagagccaggattctttactgagggatcagggatgggctctgggggagttcatgaaccccagaatttgcaggtgaaattgtgtgtctttgtgagaacacggttacgcatttttctgggaaggagatccataattttcatcagatccagattctttttttttttttttttttttgagacagagtctcgccctgttgtccaggctggagtgcagtggcatgatcttggctcgctgcaacctctgcctcccgggttcaagcgattctcctgcctcagcctcacgagtagctgggactacaggcataaaccaccatgcccggctaatttttgtatttttagtagagatggggtgtcaccatgttggccaggctagcagatccagattctttttttttttttttcgagatggagtctgactctgtcaccaggctggagtgcagtggcaggatctcggctcactgcaaccttcacctcccaggttcaagtgattatcttgcctcagcctcacgagtagctgggactacacgtgcttcaggcacttgctgccatgtccagctaattttgtagttttagtagagacagggtttcaccatgttggccaggatggtctcgatctcttgaccttgtgatctgcctcctcggcctcccaaagtgctgggattacaggtgtgagccaccgcacccggcctcttttgttttttagacggggtcttgttctgtcacccaggctggttggtgtgcagtaacataatcatagctcactgtttgtagcctccaacttctgggctcaagtggtcctcctgcctcagcctgtggagtagctgggactgcaggcgtgtgccaccacacctggctaattaaaataaattttttttttttttagagatgggttcttgctgtgttgcccaggctggtctcaaactcccagcctcaagcgatcctccaacctcagcctcccaaaagtgttgggattacaggcatgagccaccgtgcctggctcaaatcttttcatatgtgaacatctcagcatgttttctttctttcttttttgagatggagtttcgctcttgttgcccagactggagtataatggcgtgatcttggctcactgcaacctctgcctcccaggttcaagtgattctcctgcctcactctcccaagtagctggggatacaggtgcccaccaccatgcccagctaatttttttgcatttttttttttagtagagatgggttttgccgtgctggccaggctggtcttgaactcctcacctcaggtgatccacccaccttggcctcccaaagtgctgggattacaggcgcaagtcactgcgcccagcctcatcatgtttttttcttaaaagataaagacttttctttttactacaaccacaatactattgtcaaaactaaactttaaaaatttccttggtgttatcaaacattcaatgtccagattccagtggtttcataaatagcctaatttgcttttagtttgtttgaattaggatctaagtaaaatctacactttgtgattggttagtatgttttaagagtctttgaaactttatttttttgattaaaaaatgtttaatttagagataggggtctcactatattgcacaggctggtctcaaatgccccaaagtgctgggattacaggtatgagccaccacacctgactgattctttttttttttttttgagatggaatctcactctgttgcccaggctggagtgcagtggcgcaacctcggctcactgcaacctccgcctcccagattcaagcgattctctcaccccagtctcccgagtagctgggattacaggcgtgcaccaccacacatggataaattttgtatttttttagtagagacagcgcttcaccatgttgtccaggctggtctcgaactcctgacctaaggtgatcttaggcccaccttggcctcccaaagtgctgggattacaggtgtgaccaccacgcccagccaatatgtggtcttatgagagcattggttcttttttttttttccctgaggcagggtctcaccctgttgcctaggccagagtgcagtagctccatcatagctcactgcagcctccaactcctggactcaagggatcctcccacttcagccttctgaatagctaggactacaggcgtgtgtcaccatgcccagctaatttttaaaattgtttttgtagagatgggttctcactatgctgcccaggctggtctcaaactcctggcctcaagcgatccttctgcctcggcctcccaaagtgttgggattacaggcatgagccaccgcccctggccgagcattgattcttgatcctcatgtgcatctgagtcacagagcagggtgggggctggctcttccccaacctggatccctggaaactacccccagagattctggttcactgggttggaatgggcctgagcatctgaaagtttgaaaagctccctgtgattctggtgtgcagcccaggcagaggccccactgtgtccacttctcttgaaaggagtggttcacaccaacacccccacttccctacctcccgtgcgctcctcgagcatgacaatgtggcttctgcccccgacacatggcacaaaaaccgctctggcacaggcctcacagttgctaagtgcagagccccatcctcagtcttccttctatttacttctgctcacctcccaaaaccctcttctccttcccaggtacccactcctgatgatgcttctctttttgttggacatgccctgtgggttctttatcttattattttattttagagaccgtggcttgctctgtcacccaggctggagtgcagtggtgcaatcacaggtcactgcagcctccaactcctggactcaagccgcagcctcccgagtagctggcgagtagctgggactacaggcgtgcacccccatgcccagctaactttttctttttttcttttgttttttgagacggagttttgctcttgttgcccaggctggagagcaatggcactatctcggcttactgcaacctctgcctcccaggttcaagcgattctcctgcctcagcctcctgagtagctgggatcacaggcgcccaccaccacgcctggctaatttttgtatttttagtagagacggggttttgctatgttggccccggagttcaatttttgtatttttagtagagacggggtttcaccgttttcaccaggatggtcttgatctcctgacctcgtgatcctcccgcctcggcctcccaaagcgctgggattacaggcgtgagccaccgcgcctggccacggcagcatctcttctgaactccagagccattccctaccaccctctgggcaccaccatccacatctcctgctgccgcctcagccttaacctctgcaaaaccaaatccgttctttctctcgagctctgcagaagctaagctgtttcaccaggccacgattcaggaaacgctttgggattcagcttctgttcttgtgaaatgggaagaatccctgtggtgagctccagatgagagcacaaaggggaacaggggtgcccgcggctggcacgccatggctggcacgccatggcactcagtggggtcaccgccccctcctgctgtcccacctccaccctgcctgctcttctcctggaatgactccttctgccagctctcagctacccaggccagaggcccaaggctcccacatctctttagctactaattctggtagatccccttttggaaatagccctcaaatctaccccagagctactgtcaaagttcagggctccatctcttttggtttttttgaaaatattttttcaaattaattatttgttggccgggcgcagtggctcacacctgtaatcccagcactttggaaggccgaggcaggtggatcacctgaggtcaagagttcaagaaccagcctgaccaacatggtgaaaccccatctctacaaaaatacaaaaattagccagggatgatgctgcatgcctgtaatcccagctactcgggaggctgaggcgggagaaccacttgaacccgggaggcagaggttgcagtgagttgagatcacaccattgcactccagcccaggcgacagtgagactccgtctcaaacaaaaaaaaattatttgtggaggcagggtcccactatgttgcccaggcctcaagtggccctcctgccttggcctcccatagcactgggattacaggtgacagccaccgcgcccagcctactttttgtctggccaagactacctcagccttcttttgcctcccaatctgtctccagttggtggctgaagtgacccttctggagcaaaaccataatcatatcactccctcttttaaaattctgtgatgggtcaggcatggtggatcacacttgtaatcccagcactttgggaggccgaggtgggaggactgcttgagcccaggagttcaagaccagcctgggcaacatagcgagaccccccgtctctacttaaaaataataaaataaaatgaaaagaaaattttttttgagatggagtttcgctcttgttgcctaggctggaatacaatggtgggatctcagctcacggcaacctccacctcccgggttcaaccgattctcctgcctcagcctcctgagtagttgggattacaggcatgtgccaccatgcccggctaattttgtatttttagtagagacggggtttcaccatgttggtcaggctggactcgaactcctgacctcaggtgatcggcccacctcggcctcccaaagtgctggaattacaggtgtgagccactgtgtccggccaataaaatgaaattttatgatggcttctgcgatctggccaaattcctcagctaaatagtttagttctttctccctgtggcctctcctcccaccatgtcacctgtgaatcccacactgcccccaccccgacactgtctgcaggtgaacagatcagttttctcagccccaaatgtcagccccaccccacacctctgcctggcaaacatcactcaccggtcctcagagacacctagtcatttattccatgagtccaccacacttgagaaacgcttcttttcttcgcgagcacgcctaccctgtgctagacagtgttcctaagggctttcaaacataaagtcttttgttttttgtttttgagacgcagtcttgctctgtcgcccaggctggagtgcggtggcacaatcttggctcactgcaacctccgcctcccaagttcaagcaattctctgcctcagcctcccgagtagctgggattacaggcgctcggctttttatttttttaattttttttattttttgtatttttagtagagacggggtttcaccatcttggccaggctggtcttgaactcctgacttcaagtggtccacttgcctcggcctcccaaagttctgggattataggcgtgagccactgtgcccagcctccaactcctggccttgtcttcctcccaccctggcttcccagagtgctgggattaacagacatgagcctccacacctggcaacttctttccatttttcactgattctctgacacatcctcattgagcacctgcactgtgtggggtgttaataattgctaggcatggaggcaacagcgtgggcagctctttctcttacttgtcaggctttagcctatgctgttgcaggactgtgccttggcctggaagccccttcccttatcctcatccccaatctcccccttcagctcttgttcctcttgcaggtcttcccttaaacatcacttcctcagcaggggcctcacagacacgcccggaggttagatcctggtccctctgtgcttcctgttcttcccccatcatcacagtctacggctgtttcctctcgatgggcaaagactgtgtctggccattgagttttctgctatatccaagtgcttcgtatactgaaccatataaatgtgctgcttttattggtcaaaacggccaaatattggcaattttatattggttagcttcatagtatgtgagctaggatacttatcccatcagagaggttgcgtagcacagtgaatcagagcccaggctctggggccgcacacctgaggtccagccctggctctgccacttgtcactaagtgattgtggactggagacaaccctcaggggccttgggttcctaatctgtgacagggatgacaataatgacctcctcgtgctgttataaaatacagaaatgtactaaaatacaaaaattggccaggcatggtggcacatgcctgtaatcccagctactcaggaggctgaggcaggagaactcaggaggcagaggctgcagtgagtctacttttattgccaaagctcgggggtccatcccttttccattgcatgccactgcactccagcctgggcaacaaagtgagactgtctcagaaaaaagaaaaagaaaaaaatgtttaaaagccaggagtttgagaccctgtctctattaaaaaaaaaaaaaattaccttggcatggtggagcagctactcaggaggctgaggtgagaggaccacatgagcccgggagttcaaggctgcagtgagccatgattgcaccactgcattccactctgtctcaaaaagaaagaaagaaaaaagtcaagagaactggagctgaaaccatgaaaggtcagttttcagcaggagagtgatcaaagaaaaccagaactagacagtcgttaaaatagcaaaaacatattgcattccagactattgctgtaggggaagagtgaccttagatcagaactgggctgaactctacaccatgggggttatagccaacgagcagagttgggggcagtggatgggacattaccatgagaaagcactgggggttgggggtattctgacaagaccaacctaaagggattcttgctgagggcaggccaaggtggtcagacagcgcctgggggagagtggagaatgaggacccccatcagggatcgggggcaatcagatgtggaggatgagggactggctaagctgacttagcagtattcttgctaaaattggacgatgcagaggtgaacacggaagtccaaggcctaactggaaaagagctgagggaacctgagtgaggtttggctatagacagaacctctgagtgagcccatcaaagttactttatttatttgtttgtttattaatttatttaagacagagtctcactctgtcgcccaggctggagtacagtggtgctatctcggctcactgcaaactctgcctcctaggttcaagcaattctcgtgcctcagcctcccgaggagctgggattacaggcacatgccaccacacccagctaagttttgtgtttttagtagggacagggttttgccatgttggacaggctggtcttgaactcctgacctcaggctaattttttgtttgtttttattctctttttttttttttttgagactgagtttcgctcttgttggccaggctggagtgcaatggcgcgatattgactcactgcaacctctgcctcctgggttcaagcgattctcctgcctcagcctcccgagtagctgggactacaggcgcacaccaccatgcccggctaatttttgtatttttaggagagacggggtttcataatattggtcaggctggtctcaaactcctgatctcaggtgattcgcctgcctcagcctcccaaagtgctgggattacaggcgtgagccaccgcgcccagccttttgtttgtttttaaatttaactttttttttgagaccgaattgcactctgtcacccaggatggattgcaatggcgcaatctcagctcattgcaacctctgcctcctgggttcaagagattctcctgcctcagcctcccaagtagctgggattacaggcgcctgccaccacagctggttaatttttgtgtttttagtagagatgaggttttgccatgttggacaggctggtcttgaactcctgacctcaggtgatcaacccaccttggcctcccaaagtgctgggattacgggcatgagccaccatgcccggccttaacttttatcttaagttcaggggtacatgtgcaggtttattatataggtaaacttgtgtcatgggggttgtacacattatttagtcacccaggtattaagtttagtacccattagttatttttcctgatcctcttgagggaagagagagaccctctcatattgtttcatactcagaaaaggaaagagaagcgaaactaaaggcaggtagcctggtgcctaggaaccagaccggaaaccaaggaaccagacccgaaatcaggcctgggcgtgcctgacctaagcctggtagttaaaattcgacccctgacctagcaactgttgttatctatagattccagacattgtatggaaggacattgtgaaacctcccgttaggttctgtttcactctgaccaccggtgctcgcagcccctgtcacgtaccccctggcttgctcaatcacgaccctctcacgcggacccccttagagttgtgagccgttaaaaaggacagaagttgagcacctgaagagctcggattttaagacgctagcctgccaatgctcccagctgattaaagccactcccttcactatcttggtgtctgaggggttttgtccacagctcgtcttgctacacttgccctcctccaaacttccgccctccaataggctccagtatgtgttattcccctctatgtgtccatgtgttctcatcatttagctcccacttataagtgagaacacgcggtatttggttttctgttcctgcgtttgtttgctaaggataatggcctccagcgccatccatgtccctgcaaagaacgtaatctcattcttttttgtggctgcatagtattccacggtgtatgtgtaccacactttctttgtccagtctagcattgatgggcatttaggttgaatcatgtctttcctatggtgaatagtgctgtgatgtgtctttataacagaatggtttacattcctttgggtatatacccagtaatgggattgctgggtggaatggtatttctggtttttggtctttgagaaattgctgcactgtcctccacgatggtttaactaatttacactcccaccaacagtgtataagtgatcctttttctttgcaacctcgccagatctcggtggtcaactcctcccactccccaggcaatgctgatttgctctgtgcctatagttttgcctttcccaggatgctgcgggaatgggatcatacggccttttggatctggctccttttagttagactgatacatttgagacaggtccctattgttgtgtgtatcagtagttggtttcttctttttttgagatggattctcagtctgtggtccaggctggagtgcagcggcatgacctcagctcactgcaaactccgcctccctggttcaagtgattatcctgcctcagcctcccaagtagctgggattacaggcacatgccaccacgcccggctagtttttgtattttttcgtagagatgggatttcaccatgttggagaggctggtcttgaactcctgacctcgtgatctgcccaccttggcctcccaaagtgctggaattacggcgtgagccatggtgcccagcctgcatcacaggttgtttacccaatactcaccagttgcagaattcaaatccattttttaaaaaatcagcctgaaaaaaaaagaaaaaaatcagtctggccaggcacggtggctcacgcctgtaatcccagcactttgggaggccaaggcgggaggatcacctgaggtcaggagtttgagagcagcctggccaaaatggcaaaaccctgtctctactaaaaatacaaaaattagctgggcgtggtggcgggcacctgtaatcccagctacttgggaggctgaggcagaagaatccctggaacccgcgggacggaggttgcagtgaggtgacatcaggccacttcactccagcctgggcaaaagagtgaagctctgcatcaaaaaaaaaaaaaaaaaaaaaaaaaaaaaatcagggtgggcacagtggctcactcctgtaatcccaggactttgagaggctgaggtgcgaggattgcttaagcctgggagttcaagacgaggctggggaatatagtgagacccccatctctacaacaaaaaatatacaaaaattagccgggcatggttggtgtgcgcctgtagtcccagttccttgggaagctgaggcgagaggattgcttaagcctgggcagttgaggctgcagtgagccatgatcgtgccactgcactgcacctagtttgaatggagtgggagtgggggattaggctctcctccctgccgtttgctcccaggccttttccgtagctggatgtgaccaacagagacagtgcccagcctcagtatagctagctcttagtggagggacaggagccatctggggcagatgtgggagagaatgtggcgaaggagagccgggtgcagtcaaggaggcttgtggctcggaggggaggtggggtgagtgagtggagactcagcagcttggctttggggaagtagacaagagagggccctctttggagagcggagcaagccaggatgtctggccttcacttccacttggaacagaagtgtgctgtgtgcgcgtgcttgtgcgtgtgcgtgcacgtgtgtgcgcgctaaatcaaacaccctcgctggctctgtgttcccctcaaggggaagccaactccacggatggcgggggtccattaggctgcaggtcttctccctgccgatagatggcgctgttgcaccgcgcctgggtttgcctctgcccgcagccatgcagggcccatcacgggctatgcctaccgcgcgaggggccttcaccatgtccactatccttatttatttatttatttatttatttatttattttttaagtgtgggtactggccgggcgcggtggctcacgcctgtaatcccagcactttgggaggccgaggcgggcggatcacgaagtcaggagattgagaccatcccagctaacacggtgaaaccccgtctctactaaaaacacaaaaaaattagccaggcgtggtggtgggcgcctgtagtcccagctactcgggaggctggggcaggagaatggcgtgaacccgggaggcggagcttgccgtgagccgagatcgcgccactgcaacagaacgagactatctccaaaaaaaaaaaaaaagtgtgggtatatagtaggtgtatatatttatggggtgcacattgataaaggcatgcaatgcataataatcacatcatgggctagatgcggtggctgacgccgagatcgcgcctctgcagtcgccaggccactgcaggcgccacagtggcgacagagcgagactccgtctcaaaaaaacaaataaataaataaatcaggttaggccgggcgcagtggctcacgcctgtaatcccagcacttgggaggcggaggcgggcgaatcacgaggtcaggagttccagaccagcctggccaacatggtgaaaccccgtctatactaaaaatacaaaatttagccgggtatggtggcaggcgcctgtaaccccagccactcgggaggctgaggcaggcgaatcgcttgaatccggaaggcggaggttgaagcgagccgagatcactccattgcactccagcctgggcaacaagagtgagattctgtctcaaaaaaaaaaaaaaaaaattacatcatagagaatggggtgtccatcccctcaagcatttatcctttctgttacaatccaattgcattcttttagttatttcgaaatgtacagttattattgactgtagtcaccctgttgtgctagcaaatagtaggtcttattcattctttctattttttttgtacccattaaccttccccacctccccatcatccttttttttgttttgagacggagtcttgctctgtcacccaggctggagtgcagtggcacgatctcagctcacttcaacctctgcctcctgggttcaagcgattctcctgcttcagcctcccgagtggctaggattacaggcctgcgccactatacttggctcatttttttcggggttttgccatgttggccaggctggtcttgaactcctgacctcaggtgatccacctgcctcagcctcccaaagtgctgggattacaagcatgagccactgtacccagccccatcatcctcattttatttattttttatttttattactatttttttaggtggagtcttgctctgtcacccaggctggagtgcagtggcgtgacctcggctcactgcaacctctgcttcccgggttcaagcaattctcttgcctcagcctcccgagtagctgggattgcaggcgcctgccaccacgcccggctaatttttgtatttttagtagagacaggagggttttaccattttggctaggctggtctcaaactcctgacctcaggtgatcctcccgccttggcctcccaaagtgctgggattacaggcgtgagccaccgcgcctggccagactgattttttttttaagtgaatttgaaagctgcaactggtgagtattggataaacaaactgtgatgggattgcaggtgtccacccccaagcctggctaatttttgtatttttagtagagaccatgttggccaggctggccttgaacccctgacctcaagtgatctgcctgccccagcctcccaaagtgtttgggattacagtcgtgagccaccgcacccggtcagaagtttaatttttttttttgagacggagtcttactctgtcaccccggctggagtgcagtggcctgatctcggctcactgcaagctccacctcccaggttcacgccattctcctgcctcagcctctggagtcgctgggactacaggcgcccgccaccaagcctggctaattttttcgtatttttagtagagacggggtttcaccatattagccagaatggtctcgatctcctgacctcgtgatccgcccgcctcggcctctcaaagtactgggattacaggcgtgagccaccgcgcccggcccagaagtttaaatttaactaggtgcccagtgatctcatcaagcccacagcactccctcaccctcgcccccacaacctcccttccccccacgccccccttcctcaccgcagtcccccccctgggacccctagatcttgaggctgatgggccagttcccagtttcactggttgttaaatattttgacagtgacccctgacagcaggagaggcagccaaactcaacagctgttctctcttccccccaggcctggcgctgctgctgccgcccgtcaccctggcagccctggtggacagctggctccgagaggactgcccagggctcaactacgcagccttggtcagcggggcaggcccctcgcaggcggcgctgtgggccaaatcccctggggtactggcagggcagcctttcttcgatgccatatttacccaactcaactgccaagtctcctggttcctccccgagggatcgaagctggtgccggtggccagagtggccgaggtccggggccctgcccactgcctgctgctgggggaacgggtggccctcaacacgctggcccgctgcagtggcattgccagtgctgccgccgctgcagtggaggccgccaggggggccggctggactgggcacgtggcaggcacgaggaagaccacgccaggcttccggctggtggagaagtatgggctcctggtgggcggggccgcctcgcaccgctacgacctgggagggctggtgatggtgaaggataaccatgtggtggccgccggtggcgtggagaaggtgctggtcctgcctgtccctggtccaaccccaccctcagcacacccctcccctcccctcccctctccagagcctccagccatgaccgggtgaacagccatggcctggagtcagcaacacaagactcttcccacctcagctcctccatctgagctgggctcagttgagctcatccagctaagctaaaggggagctgggcctgcttttctttttctggagatggggcctcagtctctccagtagctggatatacaggcatgctccaccccactggctaatttttgctttttttttttttttttttttttgagatggagtctcactctttcacccaggctggagtgaagtgatgcaatctcggctcactggaacctctgcctcctgggttcaagcaattctcctgcctccgcctcccgagtagctgggattacaggcgccagccaccatgcccggctaatttttgtattttttagtagagacagggattcaccatgttggccagactggtctcaaactcctgacctcaggtgatccacccacctcggcctcccaaagtgctgggattacaggagtgagccactgcacccagctgccttttttttttttttttttttttttgagatggggtctcactatgttgcccaggctggtctcaaacttctggactcaagtgatcctcccaccttggccacccaaagtgctgggattataggcataagccaccatgcctggttttggaattggttctttatctttgttctgctgctgcgtggcgtgatgttcaagagcaaaggacaacacaggggaagccagtgtcactggcaccacagccttgagcccatctctctagccctctgcaccttatttcccatctgtgaaatgcccttaaacaccccttctaattttaatattctgagtcaaattgagctcaggtccaaatgccaaatattgctgatattcatccactttttgacccacaaaagtggtcattttaacctacaataaaacatcctggctcagtggctcatacctgtaatcccagcactttgggaggcccagttggggggattacttaagtccaggagtctgagaccagcctgggccatatagcaagattctgtctctacaaaaaattaaaaaattagccatgcttgtgggcaagcccctgtagtcccagccacttgggaggctgaggtgggaggatcacttgatcccaggaggtggaggctgcagtgaactatgactgcactgaactccagcctgggcgacagagcgggaccctgactcaaaaacaaaacagtggccaggtgcggtggctcacgcctgtaatcccagcactttgggaggctgagatgggtggatcacgaggtcatgagttagagaccatcctggccaccatggtgaaacgtcgtctctattaaaaatacaaaaattagctgggcatggtggcacgcacctgtagtcccagctactcgggagactgaggtgggagaatcacttgatcccaggaggtagaggctgcagtgagctatcattgcaccactgcactccagcctgggcgacaggttgagaccctgtctcaaaaacaaaacaaagcaaaaacaaccccaaagtctggtttccttattaaccccaagttcatggtccacccgaagcttttcaaatgtcagtcccggctccccgcgccccagctgcagtgctgggccctatcgtcaccctcgccctcccggctccctgcgccccagtgccaggtgctgggcccagtcctcacccttgtcctcccggctgcccagcaggcggtgcgggcggccagacaggcggctgacttcactctgaaggtggaagtggaatgcagcagcctgcaggaggccgtgcaggcagctgaggctggtgccgaccttgtcctgctggacaacttcaagccagaggtaaggtgggctctgcctccggggagggatctgtggtgggctcttacctccccttggcttgtgtcccgcaggagctgcaccccacggccaccgtgctgaaggcccagttcccgagtgtggctgtggaagccagtgggggcatcaccctggacaacctcccccagttctgcgggccgcacatagacgtcatctccatggggatgctgacccaggcggccccagcccttgatttctccctcaagctgtttgccaaagaggtggctccagtgcccaaaatccactagtcctaaaccggaagaggatgacaccggccatgggttaacgtggctcctcaggaccctctgggtcacacatctttagggtcagtggccaatggggcacatttggcactagcttgagcccaactctggctctgccacctgctgctcctgtgacctgtcagggctgacttcacctctgctcatctcagtttcctaatctgtaaaatgggtctaataaaggatcaaccacatggggttctgcggtgataatgagcacatagtgaggggtcagcaaatgtcagaagttacctgggacagccgggcacgatggctcacacctgtaatcccagcactttgggaggctgaggcgggaagatcacttgagttcaggagtttgagaccagcctggccaacatggtgaaaccccatctctaccaaaaatagaagaattagctgggtgtggtggcacgcgcctgtaatcccagctacttaggaggctgaggcaggagaatcgcttgaacccaggaagtggaggttgcagtgagctgatggtgccactgcactccagcctgggtgatagagcgagactctgtctccaaagaagaaacaaaggaaagaaagagagaaagagagagggagggagggagggagggaaaggaaggatggaaagaaaggaagaaaggcaggcaaaagccccagacaggccaaaaccttcatccttcatgcacccaacctgtaccaaacaccagcatggcctggctgtgagtgcacagcagatggaggtttgctgggcagagacactgggctggcctagacactgcctttggtgataccctaaaccaaaggggccagtcccacagtaagaaggagaccactactactcctgctgccctcctccccccaccttgcctagtttacaagacaggaggaaagagagaaagcaaaaagttagaaaacaaaacaaaacagaagtaagataaatagccagaagaccttggcgacaccacccggccctggtagttaaaaaaaagtaacaataataataatatcaacccctgacctaaactacttgtgttatctgtaaattccagacattgtatgaaaaagcattgcaaaactttctgctctgttagctgatgcgtgtagcccccagtcacgttccccgcttgcttgagatatcatgaccctttcacgtggaccccttagagttgtaagcctttaaaaaggccaagaatttctttttcagggatctcagctattaagatgcaagtctgccaatgctcctggccaaataaacctcttccttctttaatccggtgcctgaggagttttgtctgtggctcgtcctgctacaagaggacacagcccagaggtgccacctgcagctgccctgtcccctctaatcccagctccaccctgcctgctcccgtccttcctccagggggaacatggacacgctcagatgaaccccagcttcttatgcctgaactggggaaactgaagccccatgggaccaggggttccactgggcatcaagggaggaaagttgagccccggggtgatctgggaactgggatctgggatctgggcaggcattggggcctgacagagcagaagtgaggagagggtaccaggagctgcaaactcggtgcctccaggacctattcggataaaataaatgggtggaactggaataagacaaagtgggggtgcgctgtggccaactggaaaatgctcgttgcagccacagcgttccattaaaaaagcgaaaggaacctgcctgcctgagtcttaagctccccctaaacccagaaatgggttagccctccagtatcctccagctctgagagctggggcgggcactccattactgggggaacaggaaatggatcctgggcactctagggcaacacacgccctccttgcagggaaatggatttccaggcaggggagatgcatgggcagaggtggcttggattgtttgctgtaagatttgaagctgtgatcaggaggtggctaggagatgggctgggtccagaccacaaaatggtagatcggaggatttggactctgtctcatgagtgagctggaaatcaagctggaaaatcagataagcttattcgcagcttcaatccagtccgttgcagaaggatgcatttgagggggctagagcagctgcagggaggccaggaggagctgtggaagaggacttgagtgtgggtcatggccatggggtttggagagaagtgatacagtgtcttcagagcttcagaaggcagagggagttcgatggctcaaggcagttggaagagttgggtgtgactgagggggtggggaaatggggcatgcgtggcaggcaaggactcttatgcatcacctcccagtcccttgtccatctggctacacttcctctttgcctggccagcctaggaccaagctgggatcatttccccaggatgccccacagacaatggcaaatgtgcccatcatagcagtttgtttaatgaaaatgatatgctgttgtgagtacgggatgtgccagcaatgctggctactgcatgagacgggagctagcagggagcaccttcatccagggtgtgcaggtccccttccctcagttaatgctcgtgggggcgggcgttagcctctccacttaccgaagaggagactgaggctttataaagttaagagagctgcttagggtcactcatcaataaagtggtggaggccagtcatggtggctcacacctgtaatctcagcactttgggaggctgaggcaggaggatcacttgagcccaggagttcaagaccagcctgggcaacatagtgagactcaatttctatttttaaaaaattatccagctgtggtggtgcacacctgtagtcccagctactcaggagactggggtgagaggatcgcttaagcctgggcagttgaggctgcagtgagctgtgactgcaccactgcactccagcctgggtgacagaggccctgtctcaaacaaaaataaataaataaataaatatataaagtggtggagcagtttgaattgtgtcattcactcattcaatatttaactgagcatctactgtgtgccaggcactattctagacaatgaacatacaacgagtaaacagataaaaatctctgtcctcagggagtctgtatgttggggttggggtgggggcggggaagaatagacaatgaaaaaatacttaaggaaaatatgtagacaccaattgtcctgatggccacccctgatggccaccagagggcactgcaaccacgcggccctccgttcgtctctaattccagctccctttccggattccgaaggcaatagccaaggaggctatgaatacgcagcatagcatctgctcaagaatcaacgcgaggaggcattggcagcagttttttctccacccacttttccagcctcatcccctcatcagacccccatccaactgcccagggtacccctgtgacttttcaaagccccgtgtactccagattcaccagctactcacattcactcccagccacccatcccctcccaaatactgtctgggttacccaccaaccccatccatccgctcacctgatgcctgtcctcctcctcacccacccacccgcgcccctcgccccttccacctgctgtcctgcccaccggaaactggccaaattgtcccatagatttttttttttttttttttttttttggataaacacagaaattgacattcctggtcttaaagcttgaaacttaaatttgccttatctgagttccttccccaggaaactgaccctcaggcctcccagatagcatcaaggaactgaaactccttttctttacccccctctaattcctgttttcccacccacagctacatttgctccccactatataaacccccaattggagtttgttggagagatggatttgagacttatctcctgtctccttggcagatgtcatctgaataaagccttctttcctggcgatactcattgtcccgggatcccagatcagctttctgtgcagtaagcaatgggacctagactgaatccctggcgtttcggtaatacacccatccatcctgtccacccccacccatcctgtccacccccatctatcctgtccacccccgacccatcctgtccacccccgacccatcctatccacccccttgtgcttccatccactcatcactcttcccacccctccgcccacccaccatccgatgctacagaagcccagaactggggcactcaatctagaggtcaaagatggcaagaggtcaaaccagattgacagtgagtcacctcagtggatatgagttttagtgtgctgaggccgtgaaaggtaaaagcatttaaaaacagcaaggccaggcacggtggctcacgcctgtaatcccagcactctgggaggccaaggcaggtggatcacctgaggtcaggagttcaaagctagcctgaccaacatggggaaatcccttctctactaaaaatacaaacttagctgggcgtggtggcatgtgcctgtagtaccagctactgctacttgggaggctgaggcaggagaatcgctgaacccgggaggcggaggtttccatgagccgagatcacaccactgcactccaccccggggaacaagatcgaaactctgtctcaaaaaacaaaaacaaaaaacccacaaaaattagccaggcgtagtggcgggtgcctgtaacccagctacgcaggaagctgaggcacaagaatcacttgaacctcaaaggcagaggttgcagtgagccgagatcatgccactgcactccagcctgggcgacagagtgagactctgtcccaaaaaaaacccagagcaaacaaacaaaaaacacaacggcgagacattcttagcaaaccaactatctgcaaacaattcaacgtcggatctttaaaaaaatcccgctgtggcattatgctgcggacacatacattaatttatggctagcccttcaagacaaccaggtgggtaaaattatgtaaatgttcaccgcctctatactttgttccaatgacttcctgagtaattgattgttttgccaattactcagcaacatttaagacctgcttccggaggccctaagtagctcagcattctaagaccgaagtactgaagaaaatctgcctgtgtggctgtgaataacatctccatccgtcactgtgcacatcagatttaggccagataacgcaggctttatttatttcaggtacgccttgcgcttcagatcatgggactctagtatagcacccccagaaaattatcaagggcaaaaaaatcataatacatacctctagttcagtgggtccttggataacctctttcctctctcctagttcttcagctaaaagattcaggagccttagcaacaagaaggagctatcccacaagttgcattattctagatattcggacacttttttttttttttaagcaggagtcttgctatgttgcacaggctggtcctgaactcctgtccttaagtgattctcttgccttggccttccaagtaactgggattacagcggtgagccaccgtgccagggttttggatgctttttttttttttttttgagacagagtctctcttgtcgccctggctggagtgcaatggtgtgatcttggctcactgcaacctctgcctcccgggttcaaacaattcttctcccttggcctcccaagtagctgggattacaggtgcgtgccactacactcagctaatttttgtatttctagtagagatggggttttaccatgttggccaggctggtctcgtactcctgatctcaggtgatccgcccaccacagcctcccaaagtactggggttacaagcgtgagccatcgcgcctggccggatactttttaaccaaaggaaaaagcaagcatctttattggaataatatatcaatatatgcaggtaatcagacaataccagtcagacaacactgacttctttttttttttttttgagaaaggaaggaaggaaggcagaaaggaaggaaggaaggagggaaggccggaggtggtggctcatacttataatcccagcactttttgaagcccagaagggagatcacttgaggccaggagtttgagaccagcctgggcaatatagagagaccccatcttgacaaaaaatttaaaaattagccaggcatgataatttgcacctgtagttccagctacccaggaggctgaggcaggagaattgctggagcccaggagtttgaggctgcaaccagccgtgactgcaccactgcactccagcctgggcgacagagagataccctgtctcgaaaataataaataaaggccgagtgtggtggctcacacctgtcatcccagcactttgggaggccgaggcaggcagatcacctgaagtcaggacttcaagaccagcctggccataatggtgaaaccccgtctctactaaaaatacaaaaattagccaggcatgatggcaggcgcctgtaatcccagctacttgggaggccaagacaggagaatcgcttgaacccgggaggcggaggttgcagtgagccaaggtcgtgccattgcactccagcctggagaacaacagcgagacttcgtctcaaaataataataaataaataaataaataaatatgtaaaaagtcccttaactgaggccaggcgcagtggctcatgcctgtaatcccaacacttcgggaagccaaggagggtggatcacctgaggtcaggagttcaagaccagcctgaccaacatggagaaaccccatctctactaaaaatacaaaattagctgggtgtggtggcgcatgcctgtaatcccagctactcaggaggctgagagaggagaatcgcttgaaccctggaggtggaggttgctgtgagccaagatcacaccattgcactccagcctgggcaacaagagcaaaacttcatctcaaaaaagccccttaactataatctaagaaacaaaaaatatttaatttttattttctgcatgatctgcttagttttcttaataagctgtgaaccagaaagggaatttgctgcggtttggcagccttttaggtggaggattatagtgaatacatttttagattattggtatagtaacttccccaaaggatgtaagattttgaggactaaaccaagtcctgcactttccattccaacctaattaattccagtgaatgaaacattcattggggaaagcacagaagatgcagaagagctgcttacatgacctgagtcaacaattcagtgaccctctgcgtataataatcaaaatagggccaggcgcagtggctcacacctgtaatcccagcactttgggaggccgaggagggcagatcacctgaggtcaggaatttgagaccagcctggtgaaaatggtgaaaccccgtttctactaaaaatacaaacaattagctaggcgtagtggcgcacacctgtaatcccggctactcgagaggctgaggcaggagaatcgcttgaacccaggaggcagaggtcgcagtgagtcgagatcgcgccattgcactccagcttgggcaccaagagtgaaactcggtctcaaaaaaataaataaataaaaataaaaatagaacaataaagtccattcataaattttctagcatagttaacttatccacctcctcttgcttttcgttaattaatttagttatcagagtacaaaatgaaaaagtaaaaaatatccattcactctcattcccatgaggtaaccacgtttaaggagctctgtgtttttagtcctcctggcatctacacttgagtggaaaagatgatcatttgtggttttaagcactattgactccctgatgtgaagaacaaagaatgtatctcactcattctttttttcttctttttttttgtgctgtttttattggtagtcttcctactagttatcatcataactttaaatgatatatttaatccccttttcttgaagcattgtttttatttttatttttttacttgtatttatttatttattgagacagagtctcactgtgtcacccaggctggagggcagaggtgtgatcttggctcactgcaacctccgcctcctgggttcaggcagttctcccccttcagcctcccgagtagctgggattacaggcacccgccaccatgcccaactaatttttgtatttttagtagaggtggggtttcatcatgtcggccaggctagtttcaaactcctgatctcaaatgatccacccaccttggccttccaaagtgctgggactggccggggatgatggctcacgcctgtaatcccagcactttgggaggctgaggcgggtggaaatcacaaggtcaggagatccagaccatcctggctaacacggtgaaaccccttctctactaaaaatacaaaaaattagccaggcgtggtggtgcatgcctgtaatcccaggtacttgggaggctgatgcaggagaatcgcttgaacctggaaggcggaggttgcagtgagccgagatggtgccactgtactccagcctggacgacagagtgagactccatctcaaaaaaaaaaaaagcaaaaaactccacaaagtgctgggattacaggcgtgagccactgcgcctggcctgaagcatcgtttttaaaattcagatataatttacatcgcatatacttcactgctttaaagggttcaggctgggcacagtggttgacacttgtaatcccagccctttgagaggctgaggtgggggggatcactcaaggccaggaatttttgagaccagcctgggcaacatagtgagactcgctctctaccaaaaaatttaaaaatgagctgggcaagatggcacacacctgtggttccagctacttgggacgctgaggtaagaggattgcttgaggccagaagctcgaggcagcagcgagctgtgattgcaccactgcactccaacctgggaaacagagtaagaccccttctttttttttttttagatggagtctcgctctgtcgcccaggctggagtgcaatggcgcagtctaggctcactgcaacctccacctcccaggttcaagcgattctcctgcctcagcctcctgagtagctgggactataggcgcccaccaccacgcccagctaattttttgtattttcagtagagacggggtttcaccacattggccaggctggtctcgaactgctgacctcatgatctgcctgcctcagcctcccaaagtgttgggattacaggcatgagccaccactcctggccaaaaccccttcttaaaaaaaaaaaaaaaaaaaaaaaaaaagaacatccttttttttttttttttttttgagacagagtttcgctctcttgcccaggctggagtgcagtggcgcaatctcggctcacctcctgggttcacgccattctcctgcctccatctcccgagtagctgggactacaggcacctgccaccacgcctggctaattttttttgtatttttagtagagatggggtttcaccgtgttagccaggatggtgtcgatctcctgacctcgtgatccgcacgcctcggcctcccaaagtgctggaattacaggcgtaagccaccgttcccggccaaaagaacatcttaataatcccagaaagattgggcgcagtggctcatgcctgtaatcccaacactttgggaggttgaggcaggtggaccacgaggtcaggtgttcgagactagcctgaccaacacggtaaaaccccatctctactgaaaacacaaaaattagccaggcatggtgatgcatgcctgtaattccagctactcaggaggctgaggcaggagaattgcttgaacctgggaggcggaggttacagtgagctgagactgtgccattgcactccagccagggtgacagagtgagactctgtctcaaaataaataaataaataaataaataaataaataaataaaataactccagaaagaaactcccttcttgtgatatcaagtacatctccctcctctcagccaatggcaaccattattctactttctgtcttgatggattttatctacatagaattgagggaagagagaacttctcatattgttttatattgttttatactcagtacctgttttaagaaaaaacaacaagaaagtaaaatcaaagacaggcagcccggcgccaggcccgaaaccaggcctgggcctgcctggcctaaacccagtagttaaaaatcaactcataacttagaaaccaatgttattcatagattgcagacactgtatagaagaacactgtgaaactccctgccctgttctgtttctctctgaccaccggtgcatgcagcccctgccacataccgcctgcttgctcaaatcaatcacgaccctttcatgtgaaatctttagtgttgtgagcccttaaaagggacagaaattgtgcattctgggagctcggattttaaggcagttgcttgctgatgctcccagctgaataaagcctttccttctacaacttggtgtctgagaggttttgtctgcggctcgttctgctacagaagcatacaacacatggccttttgtgcctggcttcttccattcagcatgtttctgagggtcatccatgttgtctgtacttcattccttttaatggtttccattgcatggatatactacattttctttacccatgcttcagttgatggacatgtgggttgtttctacgttttggctattatgaattatgctgctatgaaaattcatgtactggttttggtgtgggcacacgttttcaatttctcttgggtgtatacctaggaatagaattagaaaatcatgttggctgggtgcggtggctcacgcccgtaatcccagcactttgggaggccaaggcgggcggatcacgaggtcaggagatagagaccatcctggctaacacggtgaaaccccgtctctactaaaaatacaaaaaattagccaggcgtggtggtaggcgcctgtagtcccagctactcgggagactgaggcaggagaatggagtgaacccgggaggcggagcttgcagtgagcagagattgcgccactgcactccagcctgggcaacagagcgagactccgtctcaaaaaaaaaagtcatgttttactttttgtggaactgccacactggttttcaaagctgctgcttgtacattccactagcaatgcacaagggttcctatgtctccacatccttgtcaacacttgttattgtccatctttttaattatagccatcctagtgagtgtgatgcagtacctaattgtggttttgatctgtattttcctaatgattgatgatgttgaacatcttttcatgtacttatagaagttattaaaaaattactttaggcagatggagaggaaaaggggtccttggaaagttgtttcttttaaagcaactccagaaacgtttctggtttaccaggaaagccctggctcttagagcccagccagcaacatttgatatgcaaatgcagaccattagaaactgggtccacccaaacatggcgattcccaccgttgtcctcttgcccttgcccccacatgtgcctggcaaatggctacccctacatatcccccacctgtgtaaaacatcatggtgccctgcatttgcatcttaaaaggctagggtgagagggccagttttttcgtgggctatatgaatgacatgcctggttaaaccaatcccctaagccctatgcaaattagacaacacctcctccagcctcctcatatacccggttggtatgccccgcatttgtggtctcctctcttggctttggagcccccctccctctgtctctgtacgggggtgccttcttcttttcttcttctcccttctttcttgcctattaaactctccacttcttaataccactacacgtgtatctgtgtcattttatccaatttgcatgagacaagagccctggtgcccctccactcatcagagccgtatcattttggtgcatgggccaggaaaatccaaagtacagccttcgttggagtggtgagtatgggagcaatcctaaaatctgttctatcattacgaggcgctcttagcctctatattaaaataaatcaaacgggcgtccgtcagcctaatacataggcttagcattggctgccgtactaaagactcggatgtgaggcttgctggggagaacttggagaatcccccattacccacaggtactgggaattttggccatgtttgaactagcttctttttgttagggataacgctcaaaatcctaaggaaattgaacactcgaacaaaggattcttagcaaagcaattttacttctgcacagagggttgcctccttggccagttgccatgagagcacacctgaacaaaggggcatgagagcctttatttgcgatggaagtcctgcccctgtaccctttcctcattggctggggttgggtcatacaatctaaactaatcccggttggctaaacatttcattttttaagatagggtgggcacgtaaaaacaagtggagaggaaggggaaggggtgtctgtaatgagctagaaagttagtcatttttccaaataaggaaaggaatgtgagctggtactgataacgcttggtactgtggtgtgcctgggcatctaacaaaggcaaaatggaaaaggagaaagaaggagaaaaaagggggggggtacaatgaattaaagaatgaaagattgatgagattatttgaagagaaacctcatcatattccacattttcacagggagaccttgccatcatgcgaggctgggaaaacttctgaggtaactgagaatttctggtcagggcacactctggcatgattcaagggcctctggaccggacgcagcctccgacagccgggtgttggcagagaatcctcaactatcctgtggccaaattttctttctgtctctatccatggtctcttaccctctctgtgtgtctaatgtgcagggatctttacagttcagggaaacaggtctgctagaagagatggtgaatcacggcagccagtaactcaataaacgtttctctatggtttctctggtgagcacgtggtatttctaagccacctagtggcaataaaaatcctcttcatgagacacattgctggttctctacggtacattgcagcttcgcaatttttctattttgcgcttttttactgctatttctgtgaacgggaaggctctgcttttaacaggagtcaaatgtcttctgcagccagattttagtcctaatattgtcccatcagtagaaattggccatttgcttcctacgttcttttaaggcacctattctgtctccagttaagatagtacttaattagtagggaaattttaagtctggaagttaaccggaaccattttcctatgggtaaatgttttatcataggccataatagcaggatttagagttcaatctagcatgccccctgccttaaaggggtcttgcccaattacatgatttttcttgaaatccatttttttaggaaggcacaaaggccacacaagtctggaaggtcaaagagaaataaaaggcagaggactaaggctgcttggggaaagcgtgactaaggctcaaaagttgagttcctctgatgtcatggcttggagggtcacgcctgcagtcacaggtcactggtggcccatttaaataggtgctgggaatccagaaaccacggagagaagatagttgggggaactccccctactgcttttgtctccaacctggatcacataccaaaaggaaggagactaaaagaacgcttttattctcacttctctttctagatgggaattagatcatgtataacatgcactgccctcgagtgtattttaaagcactgggactccttcaactctgaaactttgaagaaaaagtggcttattttcttttacacaagggcatggcgtatttgtttttgttttttttttgttttttttgtttttttttttttgagacggagtcctgctccgtcactcaggctggagtgcagtggctcgatttcggctcactgcaagctccacctcccgggttcacaccattctcatgcctcagcctcccgagtagctgggactacaggcgcccgccaccacgcccggctaactttttttgtatatttaatagagacggggtttcactgtgttagccgggatggtctcaatctcctgacctcgtgatccacccatctaggcctcccaaagtgctgggattacaggcctgagccactgcccccggctgggcgtggcctttttactaaacttctgcaagcgttgcaaaatcaacctagctcttttagcaatcacatcaggcaggcccaaagagaatgattacccaaaattagagaagccagttctaggggaaccacctgaggattcctttatttggggccccttcaagttcctttctcattatttaggaccttaggcaagtaaagggagacttaggccaattttctttctttctttatttttttttgaaacatagttttgctcttgttgcccaggctagagtgcaatggcgtgatcttgactcactgcaacctccacctcccgggttcaagcaattctcctgcctcagtctcccaagtagctaggattcacaggcgtgcatcaccatgcccagctaattttatgtttgtttgtttttttagtagagacagtttcaccatgttggtttggctggtcttgaactcctgacctcagatgatccacccgcctcagcctcccaaagtgctgggattacaggcgtgagccactgcgcctgtccaatcttctaatgaccctgataggtatacagaagttttccacaatttaactcaggtatttaacctctcatggaggaatgttatgctgctcttaagccaaaccctaactgcagttaaaacaggcagctctgcaagcagaagaaaattttggagataagcaataggtctcctatagtaggccaaaagggaaaagaaaaaatagggaaggcaaagaaataggggaaacaatatttccaataggaaaagaggcaatacctcttggcaaccctatttgtcactcctttctatggtgtttttccttctttcacggtttaaaatggcttctatctcttttataatgttcttccaacctgggaaaagttatttttccaaacgttaaaatgcttggcttagagttgagctagggggaagggaacacagaagcctggtatgctggcaaaagggtaaacatttcttaccagatgggcttttggcttctccctgtgcaaaccggtaaaagggataataaggatcattgtttatattctctgtaaatttctaattcataaaaaaggatttgtgaggttggtcttaagctgtaaacaatctggtgtgctttgcatgtctttccctaagaaagggtatcttaggttaggatgcaggcctaggaccccataagcctggtgtttgagcgagcccaacaaaatcgtcactaacaaaattggctataagccttcatcttgtttcatgtccttggaaacatgacctgtaaccacgtggcaatactttgtttgagtctccaccatttcataatggtggctgtcttctggtgctaagtcagtttctgggtgagggccacaaaatcagattaagtcggtttgtcaatctgggtggtgccagctgatccatcaagggcagggtttacaaaatatcttaaacactcattttaagagtagtttagggagtgtcaaaatcttgtagcctccagatgcatagctcctaagccatagtttccaatatatatatataattttatattatatatatacataattttatattatatatattaatatataatatatataattatatatgttaatatatttaatatataattatataaaatatataatatataattatatatgttaatatatttaatatataattatataaaatatattaatatatataattatatagttaatatatttaatatataattatataaaatatataattatatataattatataaaatatataaatatatataattatataaaatatataattatatataattatataaaatatataattatatataattatataaaatatataattatatataattatataaaatatataaatatatataattatataaaatatataaatatataattatataaaatatataaatatataattatataaaatatataaatatataattatataaaatatataaatatataattatataaaatatataaatatatataattatatataattatataaaatatataaatatatataattatataaaatatataaatatatatatatatatattttttttttgagatggagtcttgcactgttgcccagggtggagtgcagtggcgcaatctcagcttgctgcaacctccacctcccaggttcaagtgattctctttgcctcagcctcacaagtagctgggattacaggcgtgtaccactacacctggctaacttttgtattttcagtaaagacagggtttcactatgttgaccaggctggtttcgaactcctgacctcgtgattcgcccaccttggcctcccaaagtgctgggattacaggcgtgagccaccacgcccagcctggtttttaatcttatggctagtttcttggtctggtccccagacaagagggaagtatatcttaagaaggggctgatatcatctttgttttaaactatctatagtttaataactataaactatctatagtttaataactataaactatagcttaataactataaactatagtttaataactataaactatagtttaataactataaactagtttaataactataaactatagtttaataactataaactatctatagtttaataactataaactatctatagtttaataactataaactatctatagtttaataactataaactatagtttaataactgtagttttaaactatctatagtttaataactataaactgtctatagtttaataactgtaaactcgcccctcccaaagttggtccagcctacacccagggatgggcaaggacagcttgggggctggaaacaaaatggagttgtttgggtcggatctcttctctttcactgtctcagtctcagttttgcaatgacagtttcaaaagctgcctattactcctttgaaaataccttgtacacttgtggataagtcataacctaattaaggctcattgggttcacctgtgaggttactttttgtaaaactcaaaagccaaaaatcttaactgcttggcatggctaaagtcaagtaacaagggattttgaaggcttttcttagagcactcagcttaattaaaagtggatattcaagttataggtatacttaaaaggcctttatgtttttctcttcttgaatcttgttttctggaaaaaggctcttctcagtcaactgaattatttttctccatttttgtcttaaccactcttaatgcatgcatgagagtccctaagacaacttctgacagcatggaactccttgggaaaaacagaggaggtgccacaaaccctgttttggaaaaaaaacctgttttcctcatgaaacccccaaaattaaaagctgatagttccctctcaaaaccaaaggctctgttctgttatgtattgtgttatctaccgttttgagttttgggggtatcaaattacttcacattataaaagagctttgatgtgtaataactaggtagaaaatacactgtaaaggatgcctaatagtagttataaatcaaaaaagcatgctcttgggcacctaaaaaacatccccaccccccacaaagagatgagactaccatgcagaatgggctaattgccaaaataagccaattggctttgggttgccttgcaatgaaatgcatggtagaaacactacactgtcttctctcatagtatctatatggtcttttcataaattgagcattgaaataaaagcatagcaaggagttcctaaaacactaatctgtcctttggtaaaaaggttataaaagatttgtaaagatttaactgtaactgtcctggaaattttgtcattcgcaaacaattgttgtcttgcttcgttccttctcagaaaatggtttataatcaagctatattaaggactttaacaggtgttctcaaatgcaggtttttaatagctttgaagattgtaacattggaataaaaaagtacaggactcataaagaatggacatattcacaaatatcaagcaaaacaaaagttaactaaatggactgcactcaaaaagttaaagcagcttttttttttttttttgtgatagagtctcactctgtcacccaggctggagtgcaatggtgcaatcttggctcactgcaacctccgcctccctggttcaagggattctcctgcctcagcctgggattacaggcgcccaccactgcgcttgacaaatttttgtatttttagtagagacagggtctcaaactcctgacctcatgatccacacgcctcagcctcccaaagtgctgggattacaggtgtgagctgccgcacctggccaaagcaacctttttaacttttgcttggaatattgcaaatacgcatgagagtccctaagataacttaaggatccttgttttgtctttcagagtcaagaaaacttattttgaactatttacagcctttaataattaagtaaggtgccgggcaccgtggctcatgcctgcaaacccagtactttaggaggctaaggagggtggatcacctgaggttgggagtttaagaccagcctgaccaacttggagaaaccccatctctactaaaaatacaaaattagctgggtgtggtggtgcatgcctgtaatcccagatactcgggaagctaaggcaggagaattgcttgaacccaggaggtggaggttgcagagccaagatcacaccattgcactccagcctggcaacaagagcgaaactctgtctcaaaataaaataaaataaataattgcgtaaggtatatgcctgtgaacaaaatttggagcatgtttgtttttctctgcctggttcctctagaacgtggagactatctgtgagtactcttaacttatggcagtaaggttgtttgcatcagtgcaataagagtcaattttctggccgggtgccgtggctcacgcctgtaatcctagcactttgggaggccgaggtgggcagatcacaaggtcaggagatcgagaccatcctggttaacacggtgaaaccccgtctctactaaaaatacaaaaaaattagccaggtgtggtggcggtgcctgtagtcccagctactcaggaggctgaggcaggagaatggcgtgaacccgggaggcggagcttgcagtgagccgagatcgtgccactgcactccagcctaggcaacagagcaagactccgtctcaaaaaaaaaaaaaaaagagtcaattttctttgtcaacaggacacagttggaaaaactggttattttaccaaggtttcactgaaagggtgtgtttccctttaaggaatcaagcttgacatgcagacccaataaaaaccccttggagagaactggcctcatagttagtctacacagtccccacacagggttcctaacctatggtcagtaaagagtgtcactttctaacaggcctgggagctccaagtttatcttggaaccttaagaggagaggatcacccaactcacaggtatttgaggatacaaacccatagttgggctcggctttaaaggtcttatctgaaattccttgtgcaacaaagtttcatcaaagccaattcaaaaggcctgtgtagaaataaccattcctggccgggcacggtggctcatgcctgtaatcgcagcactttgggaagccaagctgggcaggtggatcacctgaggttgggagttcgagaccagcctgaccaatatggagaaatcctggactcttctaaaaatacaaaattagctgagcgtggcagtgcatgtctgtgaccccagctactcgggaggctgaggcaagagaacagcttgaacctgggaggcagaggttgcggtgagccaagattgccctgttgcactccagcctgggcaaatcatcaggccaagtataaaactaaagtttattctacaaacaacacacatggtcctatcataatttgtttttaccaaaaatgagacctggagaaattgtgtcccaaagcttatcatacatttgtcattaaatcctagtctcattaattgtttttaagctttttgcctacattttagactaaccctgtttattcctgtaaatcaagtggtgatctgcagcttggaagaaaaaaaaaggaatggagaatgtaaaaatctgaatcaatatactggttctgggcaattatcctataaattctgccaggtaataaaagtgagtaggggccaggcgcggtggctcacccctgtaatcccagcactttgggaggccgaggtgggtggatgacctgaggtaggagtttcagaccagcctgggcaacatggtgaaaccccatctctactaaacatacaaaaaaattatctgggcatggtggtgtgtgcctataatcccagctactaggaaggctgaggcaggaggatagcttaaacacaggaggtggaggttgcagtgagccgagatcgcgctattgccctccagcctgggtgagaaggcgagactccgtctttaaaaaaaaaaaaaaagaaaagcagggcgcggtggctcacgcctgtaatcccagcactttgggaggccaaggcgggtggatcacgaggtcaggagatcgagaccatcctggctaacatggtgaaaccctgtctctactaaaaatacaaaaaaattagctgggcgtggtggcgggcacctgtagtcccagctacttgggaggctgaggcaggagaatggcgtgaacccaggaggtggagcttgcagtgagctgagatcgcgccacggcactccagcctgggcgaaagagcaagactccgtctcaaaaaaaaaaaaaagtgagtagggtgcccatagcttggagatttctttgtttgggaaaataaaacaaaagaacttcataaacccccaaagggaaattctatatcttggcaagtaaaattttaagtggaaattatctactacaccacacttgtgggaattgctgtactcaccccactattttcaatagggttatacacggtagcaccttaaagctgaaatattggacagagtttccattgccgtagtattctgcttattatccttatagcagggatagtagttactaacgaaaaggaagcataaaagttactatcaccgaatctgccaggactttttactgggtttagtgatgcacttttaaatgaaacatgctgcttctggattaaaacctctactaaagtagaggaaaatctacaggtacttaaagatgaaatcaaaatcattgacaggctcagagaaaatgccggcttcagccccgggtggctacaatccctctttaatgaattcctgtcttctttatggaattggttaacccctttattaagccctgtcttgtttatatgtcttgtataaatatttggaccctgtatactcaatactgtaactcaaattgtttcctcttgcttagaagccatctaactccaaatggtgcaaactgaacaacccaaggacatgcccccacatgtgcctggcaacgtggctgcccccacatatccccacctgtgtaaaacatcattgcaccctgcatttgcatattaaaaggctagggtgggagggccagttttttcaaaggctacacgaataaaatgcctggtcaaaccagttccctgagccctatgcaaatcagacaccgcctcctccagcctactcataactggctggtatcccccgcacttgtggtctcctctgttggctttggagcccctctccctctgtctctgtacaggggagcttcttccttctttctgctcccttttttcttgcctattaaactctccactccttaaaaccactccatgtgtgtccatgtggctttatccaattcccacggaacaggagccctggtgttcctccactcatagaagctttattacttatatatatattctatatatccatcatgcatcctacaaagtgaaagcaactttttttttttgagatggagtctcactatgtaacccaggctggagtgcaatggcacaatctcggctcactgcaacctctgcctcctaggttcaagtgattctcccacctcagcctcccgagtagctgggactacaggcgcatgcaaccacagccagctaaattttgtatttttagtagagatggggtttcaccatgttggccaggctggtctcgaactcccgacctcgtgatccacccacctcggcctcccaaagtgctgggattacaggtgtgagccacaaagcccggccaaagtaacttattaattctgataatttttccctccctccctccctccctcactttcttccttccttccttcgttttgttttggtttttgagatggagtcttgctctatcgcccaggctggagtgcagtggcatgatctcggctcactcaacctcttcctcccaggtgcaagcgattctcctgcctcagccacctgagtagacgggattacaggcgtgtgccaccacactcgtttttgtttgtttgtttgtttgtttgtttgttttttgagacagagtctcgctctgtctccccagctggagtgcagtggcacaatctaggctcactgccagctccacctcccgggttcaaatcattctcatgcctcagcctccccagtagctgggactacaggtgcccaccaccatgcccggctaatgttttgtatttttagtagagacaggatttcactgtgttagctaggatggtctcgatctcctgacctcgtgatccacccgcctcggcctcccaaagtgttggaattacaggcgtgagtcactgcgcccagcctacacacactttttttttttttttaattagctgggcctggctgagcacggtggctcatgcctgtaatcccagcactttgggaggccaaggcgggcggatcaactgaggttgggagttcaagaccagactgactaacatggagaaaccccgtctctgaaaatacaaaattagccgggcatggtggcgcatgcctgtaatcccagctactccagaggctgaggcaggagaatggcttgaacctgggaggcggaggttgctgtgagctgagatggcgccattgcactccagcctgggcaacaaaagtgaaactctgtctcaaaaaaaaaaaaaaaaaaattagctgtgcctgtagtcctagctactgtggaggctgaagcaggaggactggttgagcccagttcaaggacgcagtgagctatgattgcaccactgtactccagtctgggcaacagagtgagatgttatctaaaaaaacagagtacaattcagtggtttttagtatattcacaaagttgtgcaatctatgccactatccagacattttaatcaacccaaaacgaaactctatgccgaatagtcactgcccattcccctctcttccctagccctgccaaccactaatctgtagggaccagccccacagggtcggtgggtctctccctgtgtgcggcgacgagagagtgtagaaataaagacacagacaaagagataagagaaaaggcagctgggcccggggggaccactaccaccaatgcccggagaccggtagtggccccgaatgtctggctgcgctgttatttattggatacaaggcagaaggggcagggtaaagaatgtgagtcacctccaatgataggtaaggtcacgtgggtcatgtgtccaccggacagggggcccttccctgcctggcagccgaggcagagaaggagaggagacagagagaaagagagcttatgccattatttctgcatatcagggactatttgtattttcactaatttactactgctatctagaaggcagagccaggtgtacaggatggaacatgaaggcggactaggagtgtgaccactgaagcacagcatcacagggagacggttaggcctctggataactgcgggcgagcctgactaatgtcaggccctccacaagaggtggaggagcagagtcttttctaaactcccccggggaaagggagacccctccccccactttcccggtctgctaagtagtgggtgttttcccttgacacttacgctaccgatggaccacagtccgcctggcaacgggcgtctgtcttcccagacgctgtcgtcaccactagaccaaggagacctctggtggctctgtccgggcataacagaaggctcgcactcttgtcttctggtcacacttcgctatgtcccctcagctcctatctctgtatggcctggtttttcctaggctatgattatagagcgaagattattataatattggaataaaaagtaattgctacaaactaatgattaatgatattcatatataatcatatctaagatctatatctggtataactattcttgttttatattttattatactggaacagctcgtgtcctctgtctcttgcctcggcgcctgggtggcttgtcgcccacactaatccactctcttaacccccctccctttttttttttttttttaagagataggggtctcattataatgttgcctaggctggcttcaaactcctgggctcaagtgatcctcttgcctcaacctcccaactagctgacacacgccaccacatcaggctttttctttttttttttttttgggacagaatctcattctgttcacccaggctggagtgcagtgatggtgtgatctcggctgcaacctccacctcccaggttcaagcgattctcgtgcttcagcctcccaagtagctgggatcacaggcatgtgcgccaccatgcccggctaattttctgtttttagtagagacggggtttctccatgttggtcaggctggtctcgaactcctgacctcaggtgatccgcctaccttggcctcccaaagtgctgggattacaggtgtgagtcactgtgcctggcctaattcttgtatttttagtagagacaaggtttctccatgttgcccagactggtctcaaactcctggcctcaagtgatcagtccaccttggccttgcaaagtgcaggggttacaggcatgagccactgcactcggtctatttttttttttttttttttttttgtagagacaagggtcttgctgccaggcgcggtggctcacacctgtaatcccagcactttgggaggccgaggtgggtggatcacgaggtcaggagatcgagaccatcctggctaacacagtgaaaccccgtctctactaaaaaatacaaaaaattagccaggcgtggtggcaggcacctgtagtccccgctactggggaggctgaggcaggagaatggcgtgaacctgggaggccgagccagcagtgagccgagattgcaccactgtactccagcctgggcgacaaagtgagactccgtctccaaaaaaaaaaaaaaaaagaaaagaagagacaagggtcttgctatgtggcccaggctggtcttgaactcctcttatcttggcctcccagagcgctgggattacaaggatgagccaccgcacctagatgctggctactttaagattttcactttatcagtggctttgagcaatttgattatgatgtgctttggtgtagtttcttgtgttagagaattgttgagcttcttggatgtgtagatttatgattttcatcaaatttggaaactgttaagctattagtccttaaggtattttttctgtgcccctctatctctcctttccttcaactccaattactcacatattagcctgcataaagttattccacagctcactgatgtggttttctttttactttccagacagggtctcactctcacccaggctgcagtgccgtggcacaatcataactcactgcaaccttcacctcctaggctcaagaaatcctcccatctcagcctcctaagtagctgggactacgggtgcacaccatcacacctggctaattttttcttttttgtagatatggagtctagctatgttgcccaggttggtctcaaactcctggcctcaagtgatcttcatgccttgacctcccaaaatgttgggattacaggtgtgagctactgtgcccagccatgtttttcattcttaaaattgttttttctgcctggccctgtggctcacgcctataatcccagcacttcggggggctgaggtgggtggatcatttgaggtcaggtgttcaagaccagcctggccaacatggtgaaaccctgtctctactaaaaatacaaaaattagccgagtgtggtggcacatgcctataatcccagctacttgagaggctgggccaggagaatcgcttgaacccaggagtcagagattgcagtgagccgagaccttgcgccagtgcactccagcctgggagacaagagtgacactccgtcttaaaaaaaaattgtttttttttctgtgaggatcacttgagcccaggaggtcaaggctgcagtgagccgagatggtgccactgcaccccagccagagtgagaccctgtctcaaaaaaaaaaattgttttttctctgcgtttcattttggatttcttttgctatgatttcaacttcactaaggcttccttctgcaatatctaatctactatcaaccctatttattgtacttttcatctctgacattgtaatcttttagatgcttgacttgggcctttgttttgtatctccttatcgctacttaattttttaacatatggcattcagttatagtaactattttaatgttttctgctcattgtaacatttgtgtcagttctaggttggtttccattaactgattattcttcttaatatggtcatgttttctgcctctttgcctgcctggtaatcttttcttaaaagtggggagcttttaaaccaatctcatcttctgggttaaaaagaatttttttgccattgaagttcatcttcatattccaatttttaaaaagcattctataaattttaatcatgtacaattatggggtacaccatgctgttatgatatatagatacagcatagagtaattgaatcaagctaattaacacgtttatcatcttaaatactcatcattttttcctgtctagctgcaactttgtactctttgaccaaagtcactccgtttcctccccacctccagtttctgctaactaccattctactctctgcttctattagttcaattatttcagattacacatttaagtgagaacatgccagaatgcggtatttgtctttctgggcctagttcatttcactcagcataatgtcctccagcttcatccatgtagttgcaaatcacaggatttgcttcttgcttctttttaaagttgaatggtattctattcaaatgtgtatatatacacattttctttatcttttctgtcttttcatctcttttttttttttttttttttttttttgagacagagtcttgctctgtcacccaggctggagtgcagtgacttggtcttggctcactgcaacctccgcccctctgggttcaaccaattctcgtgcctcagcctcccaagtagctggaattacaggagtgcaccgtaccatgcccggctaatttttgtatttttattagagacagagtttcaccctgttggccagactggtctcaaactcctggcctcaggtgatctgcccgcctcagcctcccaaagtgctgggattatacacgtgagccaccacgtccagcctgttttttgtttgtttgttttttgtttttgagatggagtctcactctgtcagccaggctggaatgctgtggtgcaatctcggctcactgcagcctctgcctctcagcttcaagcgattctcttgcctcagcctcccaagtaactgggattacagacgcctgccaccatgcccagctaatttttgtatttttagtagagatgggggtttcaccatgttggtcaggctgctctcaaactccttacctcaagtaatctgcctgctttggtctcccaaagtgttgggattacaggcgtgagccacagcgcctggccacattttctttatcctttcatctgctgatggatgcttaggttgatgtcatgatttgcctgttgtaaataacactgcagtgaacctggaaatgcagatatctctgacacactgatttttcagttcctttggatatacacccagaagtgggattgctggatcatttggtaagtctacttttagttttttcgttttgttgttgttgttgttgttgttttaaatgagtctggctctatcacccaggctggagtgcagtggcactatcttggctcactgcaaacctccacctcttccctgctcatgcaatccttccacctcagcctccctagtagctggaactatggtgcatgccaccatgcctggctaatttttgtattttttgcagagacgggggttttaccatgatgtccaggctggtctcaaactcctgggctcaagtgatctgtccacttcagcctcccaaaagtgctgggattacagatgcaagccaccacgcccagcctatattttgaggaacttccatataattttccagaatgactgtaataatttacattcccacgaacggtgggtaagggttcccttttctccatatcttcaccaacaccagcaccaacaggtgatatctcatcgtgcttttaatttgcgttttcctggtggttagtgctgttgaacattttttcatatatttgttggtcatttctgtgtcttttttttttttaatatctgttcaggtcctttgcccattttaaatcagcttatttgtttttttcactctgagttttttgagtttcttatatattttgggtattaacaccttattggatgtattgcttacaaatgttttctcccaatctgtaagttattacttcattctgttaattttttccttatgcttggtaatccttgattgcttatcagacattgtaaattttaccttgtagaacaccaaatatttgtgtaatctttatgatttgttagacaggtccagattaatgctcagtgtaggcttaatttttttttttttttttttttttttagatagagtctcaccgttgcccaggctggagggcagttgtgccattttggtgcactgcagcctctgcctctggagttcaactgattctcctgcctcagcctcctgagtagctgggactagaggcacacgccaccatgcctggctaatttttgtatttttagtagagagtgggttacaccctgttggccaggctgctcttgaactcctggcctcaagtgatctgcccaccttggcctcccacagtgcgattacaggtgtgagccaccgtgcctgcccggcctttttaagagatgtggtcttgctgtgttgcctgggctggtctcaaagtcctgacctcaagtgatccacccatctcagcctcccacagtgctgggattacaggcatgagccactgcaccggaagtctaggtttaattattccccattactgagacaagatcttcctgagcactctaccccatgcctagcgaatgatcagtttttccagctggccagtgggaagaggtcctggccctacctcgtgtgaatcttgggcgttgtttcctcgaatcctttcagctggttctttccctggccttggagagtttcttcacacacatgtgctgattagttctttgctgaatcctctgaagtcctctggggtactctctctgtgcacctctgtcttgtaggtgttccattatctaagctctagctgctgtggtctcctcggactcagccactccatttcctcaactctgcgaatcctctgggctgcaacaacccacatcccccttgccctgccccacactttggaaacgctctcgaagcagtaaactgcacagtcctaaaaggactgttgatgtcctttctctctgggatttcattgcttttgttactttctctcattgcttgatgttcagcgttttgaacactgttgttccatgtattgggtctgtttttgtcactgtggtggtggtgattgtttcagacaggagggcggacccagcccacgtgactccatcttggctggaagcaggaatctcgggatcagtggtttcaaagctcctcaggtgattccaggggacgctgaggtgaggaccacttgcagagactcctctgcttgaaatatctctcaatcaaatggaatcttcttttgttgttcccaccccttcattttctctgttctctctttctgagttttttctttgtttttgttttttgagacaaggtcatgctgtgttgcccaggatggagtgcagtggtgccatcacggctcactgtagcctcaacctcccgggctcaaacaatcctcctgccccagcctcacgagcagctgggaccacaggcccataccatcacgtccagctatgttctctctttctggaacttctgttaaacaaatatggattgaattgattctccatctcttttctttcatattttcctttcttttctttcttttttgttggcattttgctctacatcctgagaggtgtttcaaaacttttccacccgtaccttcctttgattaattttttatttaacttaattaattaattaatttttgagacatggtctcactctgtcacccaggctggagtgcagtggtgcaatctcagctcactgcagactcaacctcctgggctcaagtgatcctcctacctcagcctcctgagtagctgggagtacagatgcactccaccatgcccggctaattattttattttttgtagagatggggttttgccatgtttcccaggctgtgatggatttttaaatttggtccgtcgtatttgtgacttccagaactttgtcttgttctccaattgcagcatcttcctggaagcctcttcttggttcgtggtgcattatcttattcattcctttcctccagggctagtgttctgctattcttcctttcttttttttttttgagacagagtcttgctctgttgcccaggctggagcacagtggcgtgatctcagctcactgcaagctccagctcctgggttcacgccattcttctgcctcagcctcccgagtagctgggactacaggtgcctgccactacgcccggctaatttttttgtattttcagtagacatggagtttcaccatgttagccaggatggtcttgatctcctgacctcatgatccacccgccttagccttccaaagtgctgggattacaggcatgagccattgcgcccaggctttttttttttttttttttttttttttgagatggagttttgctcttgttgcccaggctggagtgccacctgcagcccagtgatcttggctcactgcaacctctgcctcctaggttcacgcaattttcgtgcctcagcctcccgagtagctgggattacagtcatgtgccaccatgcccggctaattttatatttttactagagatggggtttcaccatgttggccaggctggtctcgaattccagacctcaggtgatccaccctcctcagcctcccagtaagccactgcacccaaccatctgctattcatcttaatcctctctggtggcaccgaaatgaagaggagacccatgtggatctccctgcagccgggtgagtctggttccacaggaggccttttcctgaactggctgcaggctccgcgggcaggtctgttaattggttaaaatgcttcattcagttaggtgggttttgttcccttctccccacccagaggacatttgggaatgtcgggagatatttttggttatggcagctagggggatccttctgacacctagtggatagaggccagaaatgccactaagtatcctaggacatgcaggagagcctctcaacgattaagaatcagctgtcccaacatgttaatagcacataggtcggagagacaccctgatttaaggccatctgagtacaggctccccagctctcaccaccaaaggccaagataaggagggtccctctacagccacttcagggaacttccaagggagcttgttcaattatgtttatttattttatttatttattttttttgagacggagtcttgctctgttgcccaggctggagtgcaacctccacctcccaggttcaaacgattctcctgcctcagcctcccaagtagctgggattacaggcacctgccaccacacccagataatttttgtattttttgtagagaaggggtttcatcacgttgcccaggctggtcttgaatgccatgaccgcccccagttgtgcttagaagataccgccaacaggccgggtgcggtggctcatgccttaatcccagtactttgggaggccgaggcagctggatcacgaggtcaggagttcgagcctggccaagatggtgaaaccccgtctctactaaaaataccaaaattggccaggcatggtagctcacgcctgtaatcccagcactttgggaggccaaggtgggtggatcatgaggtcaggagatcaagaccatcctagctaacacggtgaaaccccgtctcaaaaatacaaaaagttagccaagcgtggtggcacacacctgtagtcccagctactcagaaggctgaggcaggagaatcgcttgaacccaggaggtggaggttgcagtgagacaaggtcgtaccactgcactccagcctgggcggcagtgtgagactccatctcaaaataaataaataaataaataaaatattaaaacataaaaatacaaaaattagccaggcaaggtggcgagtacctgtaatcccagctactcaggaagctgaggcaggggaatcacttgaacctgggaggtggaggttgcagtgagccgagatcacgccactgcactctagcctgggtgacagagcaagactctgtctccaaaaaaaaaaaaaaaagaagacacctccagctgacagatcatgagccacatgtggcccaggcttgtcttgtttggcttttatagggagatagatttatatatatatacatatatatatatgttgttctgtagtgttgcgtcatgagatattgaaaaacacacataactttttttaaaatttgttctgggccaggcgtgtaatcccagtaatttgtgcagctgagatgggaggatcgcttgatctcaggagttcaagaccaacctgtgtgacacagtgagacactcatctctacaaaaaattaaaaattactggggcatggtttcgtgcacctgtggtcccagctgagatgggagaattgcttgagcacacgaggtcaaggctgcagtgagccaagatcgcaccgctgcactccagcctgggcgacagagcaagatcctgtctcaaaacaaacaaaaacaaaagtaaaactacaatgtgaatgcaagttttctcagaatatacatcctttaatattttgatctttgaattttcaatcactatctaccacagaatgttccctttccaaattacaactaatttataactcagtaaggaacactctgggacaagttcttttttttctttcttttttccaactctggatacagattggcagacagcagtcttgagagcttgttgggagggtctagcaggggagcacagctacttgtatgcccttgaccgaagactggtccttgtctatcggggatggttgtcctctttaacggagtgcacagcttcaggaggttgcacatggagtagtgagggaggaaggggacacccacctagccagccaggtcagctgaatcaaccctggcgatcagtggggtaacatgttgcagccagatcgccctcacatccaggcagcagtctttagtgaagtgctaacattgttcaacagagaaatccaatagctaggttggaggtgggcagagaaagggaagttataaaactcaccaggctgggcgcagtggctcatgcctgtaatcccagcactttgggaggccgaggcgggcagatcatgaggtcaggagatcgagaccatcctggctaacacggtgaaaccccatctctactaaaaatacaaaaaattagccaggcgtagtggccggcacctgtagtcccagctacttgggaggctgaggcaggagaatggcgtgaacccgggaggcagagcttgcagtgagctgagatcgcaccactgcactccagcctgggcgacagagcgagactccatctcaaaagaaaaaaaacaacaacaaaaaaactcaccaaagatttggctaacatcacatcaaaaggagtattctcattttacttaaaatgcccacatttgtgtttgttttgttttgttttgagacagagtttcactcttgttgcccaggctggagtacaatggtgcgatcttggttcactacaacctccgcctgcccggttgaagtgattctcctgcctcagcctgctgagtagctgggattacagatgtgccccaccatgcccggctaattttttgtgtttttagtagagatggggtttcaccatgttggccaggttggtcttgaactcctcacctcaggtgatctgcttgcctcagcctcccaaagtgctgggaatccaggcgtgagccaccacacccgaccccacatttgtttttatgatagaatgttttcataatttattatattactaagttgtgttttagatttttcagtttcaagtttggtttctaaaataaatgagtacaaaccacaagctcagtttctcctgaaactctcacagcctgcttctgacgtcagatgtgtgtgggttgcacactgcgttaatccattctcacactgctataaagaaatacctgagactgggtaatttataaagaaaagaggtttcattggctcacggttctgcaggttgtaaagaaagcatctgctcagcttccggggaggcctcaggaaacttacagttatgacagaaggtaaaggggaagcaggcacgtcttacgtggccagagcaggaacaagagagagagtgaaggggtaggtgtcacacacacattttttttttttttttgagatggaattttgctcttgtcacccaggctggtgtgcaatggcacaatctcggctcactgcaacctccgcctcccagattcaagcaattctcctatctcggcctcccaggtagctgggtttacaggcttgtgccaccatgcctggctaatttttttttttttttttagatggagtctcactccgtctcccaggctggagtacagtggctcgatctcggctcactgcaacctctgcctcccagattcaagtgattctcctgcctcagcctcctgagtagctgggtttacaggggcgcaccaccacacccggctaatttttttattttcagtagagacggggcttcaccatgttggtcaggctggtcttgaattcctgacctcgtgatccacccgcctcggcctcccaaagtactgggataacaggcgtgagccactgcgctcagccaattttttgtatttttagtagagctggggtttcaccatgttggtcagctggtctcaaactccagacctcaggtgattcacctgtctcggcctcccaaagtgctgggattacaggcatgagccaccgcacccggccagtttcacacacttttaaaccaccagatctcacaagaactccctctcacgacgacagaaccaagggggatggtgttaaaccatgttaaatcatgagaaaccaccctgacaatttaatcaccccccaccaggcatcagctccaacactagggtttacaatttgacatgagatttgggcagggacacagatccaaaccatatcacacaccaaacaagcaatcagttctactgcagacaccagctgggtgtcctctgatttttttttttttttttgagacggagtctcactgtcgtccagtgagattgcagtggtgcaatcttggctcactgcaacccctgcctcccgggttcaagtgattcctctgcctcagcctccggagtacctggggttacaggtgcctgccaccacgcccagctaattttttgtgtttttggtacagacggagtttcaccgtattagccaggatggtctcgatctcctgaccttgtgatctgccctcctcggccacccaaagtgctgggattacagtcttgagccaccgcgcccggccatgtccactgatttaatccaattataacatcatctacctggagatagcgtcacatctcacggggtgagggctgcatcccacaagactgcccctgacttccgatgccaattgcaagccccaggtttttttacctgcacttctaaccaactggctaataaatcagggttctcccggccctgcccttgggtgacattaacttgctagagtggctcacagaactcagagaaacatgtttaccagtttggttattataaaggatatttcaaaggccaggcacggtggcttatgcctgtaaacccagcactttgggaggtcgagacgggcagatcacttgaggtcaggagtttgagaccagcctgggcaacatggtaaaacccccatctctacaaaaaatacaaaaattagccaggcatggtggcatgcactgtaattccagctactcgggaggctcaggagtttgagaccagcctgactaacatggtgaaaccccgtccctactaaaaaatacagaaattagccgggcgtggtggcatgcgcctgtaatcccagatacttgggaggccaaggcatgagaatcgcttgaacccaggaggcagagtttgcagtgagctaagatcacaccactgcactccagcctgggtgacagagcaagactctgtctcaaaacaacaacaacaaagaaaaccaaagtgatccacccaccttggactcccaaagtgctgggattatagacatgagccaccatgccctgcctttttttttttttttcagacaggatctctcgctctgttacccaggctgtagtgaaatagtgtgataatgtgatcacagcttcctgcatccttgaccgcccccagcctcaagtgttccttccacctcagcctcctgagtggctgggactacaggtgaccgccatcatgcctggctaatttttgttttttctttttttagagatggggttttgccatgttgtccaggttggtcttgaactcctgggctcaagtgatcctcctcccttggcctctcaaagtgctgagattacaggctatgagcctctgtgcctggcccctaaactttttccaacccaccattccaccatgctccgtgtatcagctctccatactttatgacttcattgctttagtcactgttctgctacttgcagcctagggcattcctaatgacacatggtccacattagactttacagatagcctcattttctactagttttgcctatgaggaagacagccctagaaagtgacagctagattgagacctaaagagtaagaattagccaagatgaagtagtgggagggaggaagatggatgttgcaaaaggaagggagtgtttgttgaaatgatcagaagttggaaaaatcttttaagcatttttcttttctttagagatgggttctctgtcacccacattggagtgtagtggtatggtcatagctcagtgtagccttgaactcctgacctcaagggatcctcctcttcagcctcctggaattacaggcatgagccatcatgcttggctaatttatttttaaattttttgtatagacctggccacgtgtgagggctcatacctgtaatcccagcattttgggaggcctaggtgggtggatcatctgaggtcaggagttggagaccagcctggccaacatggagaaaccctgtctgtactgaaaatacaaaaatttgctgggtgtgctggtgcacacctataattccagctatttgggaggctgaggcaggagaattgcttgaactcaggatgtggaggctgcagtgagccaagattgcaccactgcactccagcctgggtgacagaccaatactctgtctcaaaaaataaaaataaaaataaattaaataaataaaaataaattctttgtagagaccgggtcttgctacattgcctaggctggtctcgaactcccagtctcaagcaatcctctcacttcagcctcccaagtagctgggattacaggagtgagccaccacatccgacccttttaagcatttttttttttttttttttggcaggcttactccaggtgcaatgtggaaaatagagacaggggaacatttaagcgcagtttaggagcaatgagtggagcagaaccaggatggaagaagtaagcatgaggagaagcaggcagaagtcaggggtgtttggaggtgctgatggggggcagaaaggagcctaggagaaagaagagtattaggcttggtgggggtggtcatgcatcctaaaataattttgaggtcttcacagggggatattgaagtggctgttagagagatagggtttgaagtcaggagagagacataggttaagacataggtttgggttcatgttacagagacccaggacgacagtgatttatacaaaagaaagtgttagttctctgtcgtgtaattacactgaggcaggcagttcaggtgtcctgtgctggctgcagggattcaagctccttccatctcctggctcagccaaccctggcatgctgccgttgtccatgatatctcaccatcatgtctggattctaaatagcaggagagagaaagaggagtggggaagaggagccagaaccagttgcatggatgcccttagccacaagggggtctgggaaatgcagcttttcctctgggtggccacaagcccagttaaaaataatggtgctggcaacgtgcatggcacacggctggaatcccagcactttgggaggctgaggcaggtggatcacttgagcccaggagctcaacaccagcctggccaacatagtgggaccccatctctacaagaaatacaaaaaatagccaggtgtcatggcacatgtctgtagtcccagctacttggaaggctgacacaggaggattacctgaaagtgaggaggtcaaggctgcagtgagctgtgattgcaccactgcactcgtcttggcaacagagcaagactctgtttcaaaaaagaaagaaaaaaagaagaggttgtattagtccattctcatgctattaataaagacatacccgagactgggtaatttataaaggaaagaggtttaattgactcacaattaagtatggctggggaggcatcaggaaacttatacagtcatggcagaaggggaagcaaaaacatccttcttcatgtggcggcagcaaggaaaagtgctgagccaaaggagcaaaagtcccttataaagccatcagatcttgtgacaactttatcaccagaacagcatggaggtaaccaccctcatgattcaattgcctcctacgacacgtggggatacagccaaaccatatcagaggtagtgctattcctttaaaataatgcgagaatagatctaggaggaccacatctgccaccgctggagatggagacatggggaacatcagggtatgagatagtaattggggccaggcgcagttggctcacgcctgtatcccagcactttgggaggctgaggcgggtggatcacttgaactcaggagttcaagaccagcctgaccaacatggtgcaaccccatctctagtaaaaaaaaatacaaaattaggctgggcgcggtggctcatgcctggaatcccagcacttagggaggatgaggtggacggatcacctgaggtccggagttgaagaccagtctggccaacatggtgaaaccccgtctgtactaaaaatataaaaattagccgggcatggtggtggatgcctgtaatctcagctacttgggaggcagaggcaggagaatcgctcaaacctgggaggcggagattgcagtgagctgagatcatgccattgcactccagcttgggcgacaaaagcgagactccgtctcaaaaaaaaaaaataaaatagctggacatggtagtgtgcgcttgtaatcccagagacttgggaggctgaggcaggagaattgcttgagcccaggaggcggaggttgcagtgaactgagatcatgccattgtactccagcttgggcaacaagagtgaaactccgtctcaaaaaaaaagagatagcaattggagccttgggcctaggtgaaatttcccagaaggagtgcagagggaggggaaaagcagcccaggactgacctttgagaaggcatgccgccagcaaagagagtcagagagcacggctgggtagcggggagggaaagcaggtgtgtgtaaagccacagagccatggggagagaacatttccagaagtgtccagtgctgtctgcaggaggcttgaaagtgtcctttgattaaaacagcaggtcatgattttgatggcagtcgtttctgtagagtgctggaagcccatggaagcctgcaaccagttgcagagggaggggaagatgagaaagtgtagactgctaggacagacggctcttcccagacgtttggctgtgaaggaggtgagaagtcgtgctgtgtgtgaggggtagagaatgagttgttggagctggacatgactcacccctgtaatccctgcactttgggaggctgaggagggaggatcacttaaggctaggagtttgagaccagcctgggcaacatggtgagaccctatgcctacaaaagtcaaaatactagttagatctggtggcatgtgcctgtaaccccaggtacttgggaggccaaggcagaaagatggcttgagcccaggagattgaggctgcagtgagccgtgactgcaccactgcactccagcctgggtgacagagtgagaccctatctcagaaaaaagaaaaaaaaaaaaaaagagttgttggttggctggttgttttaaggtgggagagatgtcaacttatttatatggggaaatagccttttgggtgatagtgtgaatggaataacctgacaagcatgtcctcaccactatgcatctagaagcgctgcataaaaccaaacaaacatcctttaaaacatgcagcttagttgcaaaaaagaaagggaaatccccaggaggcacgaagaggaaactgaacactagagctgtgcaacttgctgggtggctgtgatcttggcattgaagggcctagggctttacacctacctagagattggagataaggccttgtctggggaactgaaaacataaacactaatagaaagcttgtacccttaaggggtgacatccttggtgaaagagtaaactaggaaaaaaatctgcctccagttcagggagcataaaaggaccttgtctgtttcactctgagatttggtgacaataaatggtctcttttgagaattcataaccaaaggcttggcctcacttggacttggggttcaagtttacatcatctgcatggtctgggaagcccaaatgtcaacaaataatatagtccaggccaggtgtggtagctcgtgcctataatcccagcactttgggaggctgaggtgggaggatcacctgaggttaggatttcaagaccagcctggccaacatggtgaaactacgtatctactaaaaatacaaaaattagccgggcatgttggcaggagcctgtaatcctagatactcgggaggctgaggcaggagacctcgggaggtggaggttgcttgaccctgggaggtggaggttgcagtgagctgagatcgcaccactgcactccagcctgtgcaacagagcaagactctgtctcaaaataataataataataaataataataataataataataacaatgtagtccagggttggtaacacccatgaagagctcttggcagaagcagatgtgaaacctctttgaaccttggtgggcatgtgcattcccactgataacaccctgctgaagctgaattcacagctcaaaattacaaaacataagaggaaacaatcttcatgaatgacagtaagcagacacagcatatagcaggattagctccaactccagaactccagagaatagcattatttggcaaagaaccatacagcaagtgtggtttaaatttctaaagatataaaagaagacatcaatatgagaaagaaataagatggtgttaaaaatgagtgggattccggtcaatgaatgcgtctaaaaaaaaaagtgagcaggagaggtttaaagtaaaaagaagaaacagtaaaatgaatgtgtctgttaatctatgaacttattcattccccattcattaggctcctatagtgttttagaccatgttctgggtctggaaatataaagatgactctgcagatagcaagttagactctgcctcaggaagatcgcatgcagaaatccatgtatcaatgcatccatttatctatacatccactcatccacacatccattctcttcacctatccattctcccatccatccatccatccatccatctattcatccatccatctgtccgtctgtccatctatccatccatccatttattcatccatccatccatccattcatccatccatctagtcttccatccattcatttatttatccatccatccatccatccatccatccaaccgtctttcattttactcactgtgggggaaagaaagagagatctgactgttactgtgtctctgtagaaagaagaagacataagaaactccattttgttctgtactaagaaaaattctgccttgagatgctgttaatctgtaaccctagtcccaaccctgtgctcgcagaaacatgtgctgtgttgactcaaggtttaatggatttagggctgtgcaggatgcaccttgttaaaaatgtgtttgcaggcaatatgcctggtaaaagtcattgccattctccattatcgagtatctagggacagaatgcactgcggaaggctgcagggacctctgcccaagaaagcctgggtattgtccaaggtttctccccactgagacagcctgagatatggccttgtgggaaggggaagacctgactgtcccccagcccaacaccgtaaagggtctgtgctgaggaggattagtgaaagaggaaggcctctttgccgttgagataagaggaaggcatctgtgtcctgctcgtccctgggaacggaatgtctcggtgtaaggcccgatcatacattctatttactgagataggagaaaactaccttatggctggaggtgagacatgctggcggcaatactgctctttactgctctgagatgtttgtgtaaagtcaaacataaatctgacctacgtgcacatcgaggcacagcacgtttccttaaacttatttatgacacagagacctttgctcacgttttcctgctgaccctctccctaccattaccctatagtcctgccatatccgcctcactgagatagtagagatagtgatcaataaatactaagggaactcagagaccagtgcccgcacaggtcctccgtatgctgagcgctggtcccctaggcccactgttctctctctatactttgtctctgcatcttatttcttttctcagtctcttgccccacctgacaagaaatacccacaggtgtggaggggctggcccccttcactcattctcaaatgtcacagctagaaaagtcccaatagaacatcttgttcaactttcagctgtctttttgtacatgaaaaaagcacatgaggccccataatacaaaactctgttttctgaagtctctaagtgaataaggtgatggaggcagatcatgaactggggccttgtccctgcatttcttccacactgcagtgcctttcctgaacccatggcatggaagcatctgacctctgaacacctgcctgtatcttctgtttctctcaggtctgttcactcctcgtgggcagagtccccacaacccagtgctgtcaactgatggtgatgataaggaatgtcattacccagctcatgagtgatagagatgggacagggccctggtctctccctggtgtcagttttgtgtccatatcttagctcacccctacctttgttccctactctgccgctagagagactgtgagctccttgagggcagggcccaggtcttattcctcccctcccagtgcccagctcagaaacagtgcttaggatgctggccagtgactacacctgggagaagagactggactaggctctcggtccctctgcctggggtttctggctgctctgtcaacttccaacatcccaaaaatcagaggggaggtcaagggattggatgagaggctccaagtgctccttagcccactgtgcagggagaagtgagtgtttcctggctgtgggtgaacttcgtggacagcattaaacaacacagcatcccgccccctgtgcggggctgtctgtctgccttggcacttccagaaggtctcattgtggtgctagagtatctaacactttctgacttgcagatcaacattcccttttcttgttaacaaagagcagtgccgggcgcggtggctcacacctgtaatcccagcactttgggaggctgaagcgggcagatcatgaggtcaggagttcgagaccagcctggccagcatggtaaaaccctgtctctactaaaaatacaaaaattagccaggcatggtggcaggcgcctgtaatcccagctacttgggaagctgaggcaggagaatcgcttaaacccagaggcggaggttgcagtgagcggagatcgcgccatcacactgcagcctgggcaacagagcgagactccgtctcaaaaacaacaacaaaaacaaagagcagagttttaggtcaatgcttccagcagggaacagaatttagatcttaacaattttgtttacattgtatttattttcatgttttaccttctattgatggcaaatgagactggttttccatttacagaagtgatacaaaagattcctgttgcaataatttcattaagtgaataatgagccaatttaaagaaaaatataaagcaaataattgtacagatggtaaactaatatggcaaaatcactaatattcaaggctgaagtttggccgggcatggtggctcatggctgtaatcccaacactctgagagatggggatgagtggctctctcgagcccaggaattaaagaccagcctgggcaacatagcaagaccctgtctctaaaaaaaaaaaatagccaggtgtggtggtacatgcctgtagttccacctactagggagactgaggtgggaggatcacttaagcccaggagttcaaggccgcagtgagctgagattgtgccactgtagtccagcctgggcaacagagtgagaccctgtttcaaaaacaaaaaaaagtggccgggtgcagtgctcatacctgtaatcccagcattttgggaggctaaggctgctggatcacttgagcccaggagttggaaacctgcccaggcagtatggtgagaccgtgtctctacaaaaaaaatacaaaaattagctgggcgtggtggtatgcacctgcagtcccagctattctagaggttgaggtgggaggatcgcttgagcctaggagttcgaggctgtagtgagttgagattgtgccactgcactccagtctgggtgacagagttgagattctgtctcaaaaaaaaaaaaaaaaaaaaaaaaaagacaaagtttggaaaattaaacccccagggaaatggaaactacatctgctgctcacccacctgcctgcctctcctaaagggaagattgggtacttggggtcccatttctgtagggtggagcattataagtaagcctagcttgtggcaaatctgtctctctggacactccagcaagctggaagggacgatgatcagaggtcacagtttgggagttgccctgctctaggacaacgctcctctccacattggatgaaactcagtttcccctggccatggccttcctcaccatggagtggtgagggtccgaggctgagacgtgtgcagatggaggagaatgggcagaggagcctgtgggttttctctgactctaggtccccactccagcaagacagcgccgctgcagcttggcccagcaagttcctccttgcagtttgggggtcaaagccacagttcatatgaaacaaaatgttcctctgcctggtctggtcctctctttgtgtattttcctagaggacctcacagtgggtgagtggccaaggagaacaggatttgtggctctgggaaactggattcctgtcatctcctgccagctgtcatcgccacaccgaggctgttcagcaccgcaggacccgttctctttggtattggtggcttcggtaaacactgaaagaaggtggaggtggctggtcgatgccatttcctgactatctagtaccttgggttcttcatctggatgcgatcttgaaggcttctggcctggcattggctccacccccaggtctctgagccacagcccaggtagctgagcagaggcactgctgggcttcccctagtccacatagcctggccaccacccagacccggggagggggactccaggtggaaggagcctgggaagggcatcttcgctggggcagtctcaatcctaatgctggatcctggggtccccggtcccactgaggcaaggcctgcctcggggatctctggggaaccctggggattcagaaccccacactggtccggccttcacgcttccagaaagctgagatctgctccaaggtgacccgtggctggaggccccactcaggatccgggctccctggccgctgcctcctggcctgggggctcccaaactggacgctggcctctggcctctgctcgggttcagcccagctcaccaggcctgtggcggggggcctcccctcccagggctggggcccccagaaggtgctccgggctgggacctccagtacggtctgggggcccaagttgctgggagcagaatttggggctgagggggcaggtggggctgttgctcgggcctccaaagtgcccacctgggtgggaggctcaggggcccgatctgtcagcagggggaccgcagagccataccagtcctcagagcgctctcgggcggtgcccatgggctcaatccacagctctcctcctgggcgccacaccagggtgggtgcacggtggctggggtctgggcggagagcacggcggaacaggcgttcagccaacacagcggtggtgaggatgaagagcgcagccagggtggccaggaccagcatgatggggatgcagggcccacagggcagtgagggccatggggctgcttcccatgcggggggcccctccacgcgcccagagggcggctctggagtcaacggcatctgagagacacaggggtgagaagaggaagtaaatgaggcagagggggcacaaccaagatgagagagaggcagcaggtgtccaggaaagcctgggagaagggctgggcatgggggctcatgcctggaatcccagcactttgagaggtcgaggcgggaggatcacttgagcccaggagttcaagaccagcctggacacacagtgaaacctcatctctaaaaataatttaaaaactagctgggtgtggtggctcacacctgtagtcccagctacacaggaagctgaggtgggaggattacttgagcccaggagtttgaagctgcagtgaccccagattgcaccactgtcctccagcctgggcaatagagcaagaccctttctcaaaaatgaaaaagaacattctggagagacagagaagcaagagggaccagaaagggtaagcgtgagccaggtggggtgggaggacaggcagcctacctcggggcacagccaggccctcctgcctggctctccaggcctttccagaatccccatttccctcccagaccccagggtgcctcagacaagaaaggtctcaagggcttctttcctccccactcggccccctcaagtcttgctcagacctagagaggaagtggtgggtgaagaaatgagaacctcccctcccactggctcccctgcgtgtgtctcccccaccgcctgccgccagcacctccgctggccccttgaggctccttcgcccctcaccattctcctcggacttgatcttgctctcataggctccacggaatctgctgccgggccgggccgggccaggcctccggaggcgcctctgcacccctcctgggctccccagctttgcccaggctctggcctgtctctatctctcgtttgtctctgcacacctctctgtcccccacatcctccatctgcagggggcctcctgcacccctcaactcaccttgggtcagtccctgggctcctctccctcctagagccactcttcctggtgctggactaagaggtgcaggcttggagggtgcagggcggtccgcctctcagacgtagaggcccggcctcggatgaaggcggaagggagggcaccgcctgttgctgggcaactgtgccccaactcgtctgcccctggggagtgtttgtttccaaagcaacccaaggggatgtggtcactgcggtgaggaggcttttcctggggtaaggtggggctggaatgggcaatggttctgttgaacttagtgtcaccccatagccaggccctgagccccagaacattcaccgaaaagctgagaaagaggacgccggggccaggcacagtggctcacccctgtaatcccagcattttgggaggtcaaggtgggcaagtcacctgaggtcaggagttcgagaccagcctgccaacatggcgaaaccccatctctactgaaaaatacaaaaattagctgggcatggtgacgggcacttgtaatctcagctgctcaggcggctgaggcagggagaatcgcttgaacccgggactcggaggttgcagtgagctgagatcgtgccaccacactccagcctgggcaacagagtgagactccgtcttaaaaaaaaagaaaagaaaagaaaagaaaaagaaataggacactgggactttagcccgtacattcccagagaaccatggtgcctcccccgttcctcctgggaggatgccccaccccatcctgccttgtcttatccacggtgcctccccagatctgctcctgccatgcagcccccacaggcaccccctgcttggccagcttgcttcacaccttttttttttttttctggtagagatgggctcttgctatgttgcccaggctggtctcaagctcctggcctcaagagatcctcctgcctcagcctcccaaagtgctgggattacaggtgtgagctaccacactggcccctgcctcatacttttaattaacataagtctctctctcttcagaccatttagcccccattttggttggaaaatatcagtgaggtgaggcttgggtaacaaaaatgtcaagcctctgagaggagtccagggtataaaaacaggcgtgggcctgtttccaaaaccctgaccatcctcatgtctgtccctctttcctgctgctgagggtgggaggagcctggagcagagtgtgacaagatgtcatcaggctctggagtccaggtgactttctgagattctctagtttgactcatccacagatgacaaaagtaaggcttaaagaaaagagatttcatgaccaaagtcgcatgaccaatgtatgtgtgggtgagcatgtagtggccagggtggtggaagaatagatagaaatccctgggctgggcgaggtggctcatgcctgtaatcccagcactttgggagaccgaggcgggtggatcacctgaggtcaggagtttgggagcagcctggccaacatggcaaaaccccgtctctactaaaaatacaaaaattagccgggcgtggtgccgcacgcctatgaccccaactactcaggaggctgaggcaggagaatcgcttgaacccggtgcagtgagccgagatcgtgccattccactccagcctgggcaacagagcgagactctgtctcaaaataaataaattaaataaataaatgaatgaaaagacagtctccgtcagactgccccatcctggtggttttgagccctgctgggaggagctggagatggagagtccgggggaaaccgcctttgcaaagaaagagatctaacttaactgactccaccttgcttctaacctccaagctgtctttgtttattcctgggcgtaggctgaactaactttgggagaaacttagtttgtagtttatagtttaaacaaagacagtaacagccctttcccaaagcagaccttcttgcctggggactagactaacactagccataggattagaaattatggtttaggagtcatgcagctggaggctacaagattctgaccctccctaaactgctcctaacatcagtgcttgagatattttgcagaccctgcacttgatggatcagctggcaccacccagatcaataaactggctcatctgatcttgtggcccccacccagaactgactctgcaagaagacagctctgactcctgatgatttcatctctgaccaatctgcactcccagatcccagcactttgggaggaccagacaggcagatcacaaggtcaggatgagaggtgacagcgtgctggcagccctcactcactctgggcgcctcctcggcctccacgccaactctccctgcgcttgaggagcccttcagcccgccgctgcactgtgggagcccctctctgggctggccgaggcgggagcccgctccctctgcttgccagaggtgtggagggagaggcgcggacgggaactggggctgcgggccacgctcgagggccagcatgagttccgggtgggcgtgggctcggtgggccccgcactcagagaggccggctggcgccattggccccaggcagtgaggggcttagcacccagaccagcagctgcagagggtgcgccaggtcccccagcagtgccagcccacaggtgcacttgaattctcgcaggcctcagctgcctccccacggggcagggcttgggacctgcagcccgccatgcccaagcgtccccctgcctgggctcctgcaccgccccctgctctgcggggcctggtcccatcaaccgcccaagggctgaggagtgcaggcacaggattggtgggcagctccacctgcagcccaggtgctaggtccactaggtgaagccagctgggctcttgagtctagtgggcacttggagaacctttatgtctagctaagggattgtaaatacaccaatcagcactctgtgtctagctcaaggtttgtaaacacaccaatcagcaccctgtcaaaatggaccaatcagctctctataaaacagaccagttggctctctgtaaaatgggccaatcagcaggatgtgggtggggccagataaggcaataaaagcaggctgccagagccagcagtggcaactcggcgtacccttccacataggaagctttgttcttttgatctttccaataaatcttgctgctgcttatcctgggtctgcactgcctttatgagctgtaacatcgtgaaggtctgcagcttcacgccagaggccagcgagaccacgaacccaccagaaggaagaaactcggaacacgtccgaacatcagaaggaacaaactccggacatgccgcctttaagaactgaaacactcaccgtgagggtccgcagcttcattcttgaagtcagtgagaccaagaacccgccaattctggacacaaggagatcgagaccatcctggctaacacggtgaaaccccatctctactaaaaatacaaaaaatttattaggcgtgttggcggatgcctgtagtcccagctagtcccagctactcccagctacttgggaggctgaggcgggagaatggcatgaacctgggaggcggagcttgcagtgagccgagattgcgccactgccctcaagcctgggcgacagagcaagactccatctcaaaaaaacaaaacaaaaacaaacaaaaaaaccctctgtttcccgaatgctcagggagactgatttgagtaataataaaactcctggctggacacagtggctcacgcctgtaatttcagcaatttgggaggccaaggccggtggatcaccttaggttgggagtttgagaccagcgtgaccaacatggagaaaacactgtctctactaaaaatacaaaattagccaggtgtggtggcaagtgcctgtaatcccagctactcaggaggctgaggcaggagaatcacttaaaccctggaggcggaggttgcagtgagccgaggtggcaccattgtactccagcctgggcaaaaagagcaaaaccgtcaaaaaaaaaaaaaaaaaaaaaaaaaaaactccggtctcctgcacagctggctctgtgtgaattactctttattgcaattttgctgtcttgatgaatcggctatgtgtaggcagcgggcaaggtgaacccctttggcagttacagggggaagctaaggctcaggacactcgcagaaacctgaggaggctagaattttaccagattacaagccttaaaatcaaacctgaagttagtgccagcgaacaacacgcttaaaaataactaagatgttctttctggctgttctagaggtcaatatagaaaaatgatagtaactttgatgttattttatgttatgtatttctttttttcttttgagacggagtctgtctctgttgcccaggctggagtgcggtgacgcaatcttggctcactgcaacctccgcctcccgggttcaagatattcttctgcttcagccatccaagtagctgggattacaggtgtgtaccaccgtgcctggcagttatgtgtgtttccctacaatcaaacaatgatttattgtaaaaaaaaaaaaaatcaaaataaacaaaacctgaaaacttgtatgtgctcttttaatcaatctttttaaacaaacttttagaagagttaacattattaaaaactggaaagatcagacatggttttttcttactaagatatcactggctgttttgattctttcatcacgtacaagtttaggccctacacaatggttcatgcctgtaatcccagcactttgggaggccaagacaggtggatcacctaaggtcgggagtttgaggccagcctgaccaacatggcgaaaccccgtctctactaaacataccaaaaaaggccgggtgaggtgactcacacctgtaattccagcactttgggaggccaaagcaggcggatcatgaggtcaggagttcgacaccaacttggccaacatggtgaaaccctgtctctactagaaatacaaaaattagccgggtttggtggcaggtgcctgtagtcccagctacttgagaggctgaggcaggagaatcgcttgaacccaggaggtggaggttgtagtgggccgggatcatgccactgcactccagcctgggtgacagggcaagactctgtctggggaaaaaaaaaaaaattagctgggcgtggtgacacatgcctgtaatcccagctactcaggaggctgaggcaggagaattgcttgaacccaggaggaagaggttgcagtaagctgtgatcatgccactgcactccaccctggacaacagagcgagactctgtctcaaaaaaaaaaaaaaaaagtttaaggccaggcaaggtggctcatgtttgtaatcccacaattttgggagactgaagcaggaggattgcttgagggcaagagtttgagaccagcctgggtaacatagcaagactcccatttctacaaaaaatcaaaaaattagccaggcatgatggcatgtgcttgtagtcttagttacttgggaggctgagaggggaggatcacttgagctcaggagttcaaggctgcagtgagctatgggtgtaccactacactccagcctgggaaacaaagcaagacactgtctcaacaacaaaaaaagaccaagtatatttagtcattctataaaatttaagaagccagccaaaaacatttatgttcagcaatttgtttcagttatttcttcttacttggaaataatacacacatctaatgaataatagttaatttaatagaacataatagaagatttaaaattacatgaaaaatttatttataataaattatccattacatactttatttttaacagtttccctagattatttatgaaaactgagatattaggcaaggatagtcattatttcaagttacttccctgttaatcatttttatagcctgtgacaatcaggtattcacctaagtaagaagcttaaacatatgagtaatttcttgataactcaggagatacagttttttttttttttttttttgaggtggaatctcgctctgtctcctaggctggagtgcagtagtgtagtctcggctcactgcaacctctgcctccaggttcaagcgattctcctgcctcagccccccgagtagctgggactacaggctcctgccaccacacctggctaatttttgtatttttagtagagacggggtttcactatgttgtccaggctagtcttgaactcctgacctcaggtgatccacccacgtcggcctcccaaagtgctgcgattactaaaccaccatgcccggccgatatagatgtttttactaaatgaaaaatattaaattagtattacttatcaaaaattacacaggctgggcgtggtggctcagatctgtaatcgcaataatcacactttttctttttcttttttcttttttttttgagacggagtcttgccctgttgcccaggctggagggcaatggcacaatctcggctcactgcaacctccgcctcccaggttcaagtaattctcctgcatcagcctcccgagtggctgggattacaggcatgcaccaccacgcccggctattttttttttttttttttttatctttagacagagtttcaccatgttggctgggctggtctcaaactcctgacctcatgatccatccgcctcagcctctcaaagtgctgatattacaggcgtgagctactgtgcctagcaacactttttctttttctttttttttttttttttttttttttgagacggagtctcactctgtcacccaggctggagtgcagtggcatgatctcagctcactgcaacctccgcctcccaggttcaagcaattctcctgcctcagcctcccgagtagctaggattacaggtgtgtgccaccatgcctggctaatttttgtatttttagtagagatggggtttcactatgttggtctcaaactcctgacctggtgatccacccccttcagcctcccaaagtgctgggattacaggcatgagccaccatgccctgcgtcactttttcttttaattaatttaaaaaaatttgtttttagacagagtctcactctgttgcccaggctggagggcagtggcttgatctcagctcactgcaacctccacctcctgggttcaaatgattctcctgcctcagcctcctgagtagctgggattacaggtgcgcaccaccatgcctggctatttttttttttttttgagacggagtcttgctctgttgcccaggctggagtgcaatggcatgatctcggttcactacaacctctgccttccaggttcaggcgattctcctgcttcagcctcccaagtagctgggattacaggtgcccgtcaccatgcccagctaatttttgtatttttggtagagatggggttttgccatgttggtcaggctgctctccaactcctgacctcaggtgatctgcccgcctcggcctcccaaagtgctgggattacaggtgtgagccactgcgcccggccattttaatttaaatagagatggggtcttgctgtgttccccaggctggtctcaaactcctggcctggagcagacctcccacctcggtgtcctgaagttctgggattataggcataagccaccatacctagcctaatctaaacactttgggaggcaggaggattgcttgaagatagtagttcaagaccagcctgggcaacacagtgagactccatctctaccaaaaaaaaaaaaaaattagctgggcatggttccatgtgcctgtagtcctagctactcaagaggctgaggcagaggatcacttgagcccaggagttcgaggttacagtgagttatatcatgctacctggacagcagagcaagaccctgtctctaacaacaacaaaaaattatacaaacacagatcattttgtttaaaactggatttgtagtcttataacccttgtgtcagaccctgacaccttaaaacatctagtagagataaatataaaactgtctggccagtaaacccaagcaaaaatgtatgctgataattctgaagacatttctatttttattttaccaatactttttttctttgtcttttttttttttttttttttttttttaaagagagttttccttggtcacgccagctggagtgcagtggcatgatctcagctcactgcaacctctgcgtcctgggttcaaacaattctcctgcctcagcctcccaagtagctgggattacaggcacttgcctccacacccagctaccttttttgtatttttagtagagacaaggtttcctcatgttggccaggctgatctcaaactcctgacctcaggtgatccacccacctcacccttccaaagtgctgggattacaggtgtgagccaccaagcctagcctattttaccaatagttttaaaaccagcttatttattaaagattaaagatttacggcagggcacggtggctcatgcctgtaatcccagcactttgggaggccaaggtgggcggatcacgaggtcaggagatcgagatcatcctggctcatagtgaaactccatctctactaaaaaaaatacaaaaaagtagccaagtgtggtggcccacgtgtgcctgtaatcccagctactcgggaggctgaggcagaattgcttgagcctgggagacggaggttgctgtgagctgagatcatgccactgcacttcagcctggccgacagagcgagactctacctcaaaaaaaaaaaaaagaaagaaaaaaaatttttttttcagtttcggctgattgaggtggctggtgcctgtaaccccagcactttgggaggccggtgtgggaggattgcttaaacccatgagctcaagaccagactgggcaacaaagtgagacctcatctgtacaaaaaatgagaaaattacctgggcatagtggtgcatgcctgtagtcccagctcaggattcaactggggaggtcgaggcaggaaaactgcttgagctcaggaggttgagctgtgtttgtgccagtgcactccagcctgggcatgagagtgagactgtctcaaaaaactgttttttatcagtttcaaatgagtttagggttaaattttcaattgtttacattttagccaggattggctaaattgtataagaaatacaaaatatctaagtgccctggaactagtaacacgtctatgttttgtttgctgatctggtttgatttgcaaatgtgggcaggaaagaactttagcaggtgttttttttattttgtttttgtttttgccttttggcctctgtgtgacagaaaaagcaacatttttatgctggacagagataccttacattattgctctgagctcaaggtttcaacttctttgatctaagagagtctaacttttatagaccttttttttggtgttttattttattttattttatttgagacggagtcttgctctgttgcacagggtggagtgcagtggcgtgatcttggctcgctgcaagctccacttcccaggttcaagagattctcctgcttcagcctcctgagtaattgggacaacaggcacgtgccactgcgcctggctaattttttatatttttagtagagacggggtttcaccatattggccaggctggtctcgaactgtttttttttttttttttttttttttttttttttttttgagacggagtttcgctctgtcgcccaggctggagtgcagtggtgcgatctcgactcactgcaagctccgcctcccgggttcacgccattctcctgcctcagcctcccgcgtagctgggactacaggcgcgcaccaccatgcccggctaatttttgtatttttagtagagacggggtttcaccgtgttagccaggatggtctcgatctcctgacctcgtgatccacccatctcggcctcccaaagtgctgggattacaggtgtgagccaccgtgcccggccccggtctcgaactcttgacctcgtgatccgcccgcctcagcctcccaaagtgctgggattacaggcgtgaggcaccgcgcctggccttataaacatttgtctagttatttttctttcttcctttctcgctttctttcttcttttttttttttttttttttttttttttttttgagatggagtcttgctctgtcacccaggccagggtgcgttggcgtgatcttggctcactgcaacctccacctcctgggttcaagcaattctctcatctctgcctcctgagtagctgggactatagacatgcaccaccacacctggctaatttttgtatttttagtagtgacggggtttcgccatgttgggcaggctggtctccaactcctgacctcaagtgatccgcctgccttggcctcacaaagtgctggcattacaggcgtgagccaccacacctagcctttttctttagattattactttttcaattaagtgtttcatcactctaagcaattgttaggcaaacctaattttatgtttttaaaacatggctagctgtcacgcccgtaatcccagcactttgggaggtcaaggtgggcagatcatgaggtcaggagatcgagaccatcctggccaacatggtgaaaccccatctctactaaaactacaaaaattatctgggtgtggtggcaggtgcctgtaatcccagctactcgagaagctgagatatgagaatcgcttgaaccagggaggcggaggttgcagtgagccgagatcacaccactgcactacagcctggtggcagagcgagactctctttcaaaaaaaaaaaaaaaaagaaaaaaaaaagaaaaggactaactggtctgaatattgtgcacctgttagtactagctactccagagtctgaggcagcaggattgctgtagcccaggagtttgaggtcacagtgagctacaatcatgccactgtactccagcctgtgcaacatagcaagatactgtctttaaaaaaaaagttgtctaggttgttggttaccatggagttgtaatttgaaagccctttaagacttttgtttaatcttgacttgaatgccataagcagtaagtgttatctcaacaccaggggaaaagttagcagattcaaagcaggcagaaaaaaaaaaaggagagaaagagaacttagaagtctctccatgctaactctatagttgtaggttttatgaataatgaccatttgagctctgaattttccttgatgtaattttgctcatcagttttaaaatgtgcacaagaatgagccataatatgtagctggtggagtcctagaaatccttgcattggccaggtgtggtggcttaagcctgtaatcccagcactttgggaatccgaggcgggtggatcacctgaggtcaggagttcgagagtagcctggacaacgtggcgaagccctgtctttactaaaaatacaaaattagccgggtgtggtggtgcatgcctgttatcccagctactctgaaggctgaggcaggagaatcacttgaacctgggaggcggaggttgcggtgagccaaggtggcactattacactccagcctgggcaacaagagtgaaactctgtctcaaaaaaaaaaccaaaacaacaacaacaacaacaaaaaccagaaatcctggtacgccttcatgtttgagaatcccattccatttctttatcttgttttttttttttgagacagtgtcttgctctgtcgcccaggctggagtgcagtggtgcgatctcggcccactgcaacctctgcctccaggattcaagtgattcttctacctcagcatcacgagtagttgggattacaggtgcctgccaccatgcccagctaaattattttttttgttttggtattttttagtagagatggggtttcaccatgttggccaggctggtctcgagctcctggcctcatatgatccacctgcctcggcctcccaaagggctgggatcacaagtgtgagccaccacaccatccccattccatttcttattcatcacttgagagcaaagaccaccctatacatgctgtaatttatgggatattaggagtttagtctggtgttttagacagcaggaaccaccctagtggcttatgttagccatcctccacccactggttggaatgtttatttttgctcttgggagatttttagaaataagcaagagaaaagagtcaaaccaaatccaaagaaaccaagataagagtgttcacaaaaattttaatccaaactggccatgcagaccaaaggttgcagtgagccgagattgcatcattgcactccagcctgggcaaaaacagtaaaactccgttaaaaaaaaaaaaaaagagggaggctcagcctgagagaagactcagcagggcagaacaggcctgttgtggaagcagagagctcacagccttcagtgagtgctgcatgccagttctaagaatcatcgattcttgggaggctgaggcaggcagatcacctgaggttaggagtttgagaccagcctggccaatgtggtgaaaccctgtctctactaaaaacgcaaaaattagctggacatggtggcgggcgcctgtaatgccagctactcaggaggctgaggtaggagaattgcttgatcctgggagacggaggtggcagagagctgagatcgtaccactgcactccagcctgggtgacagagcgagactccatctcaaaaaaaaaaaaaaaaatcatcaattccttctaatagtgattttttcaggtaccatttctatatatagatataccatgtatatctacctaataacagagggtctttaaaagaaaatgatgtttatttgggaatagtgcaatgggaatacatatgctatagcaaacaatgtgtgtattcagggaggtaaaggaacaaagatcaacaacaatgccaggcacagtggctcacgcctgtaatcccagcactttgggcggctgtggtgggaggatcacttgaggccaggagtttgagaccagcctgggcaacatagtgagaccccatctttaaaaaaaaaaattttttttttaaattacctgagtgtggtggtgtgcacctatggtcccagctactcaggaggctgaactaggaggatcccttcagcccaggagtttgaggctacagtgagctataatcatgccattgtactccagcctgggtgacaacatgagaccccaaaaggagaaagagagtgagagaggaaggaaggaaggaaggaaggaaggaaggaaggaaggaaggaaggaaggaaggaagaaaagaaagaaagaaagaaagaaagaaagaaagaaaggcagagaaagaatattagctgggcatggtggcatgtacctgtagtcccacctactcaggaggctgaaatgggaggattgcttgagcccaggagttgaagaccagcctggacaacatagcaagaccctatctctacaatatatacatatttttttttttcctgagatggagtcttgcttgcccaggctggagtgcagtggcatgatctcggctcactgcaacctctgcctcccgggtttaagcaattctcctgcctcagtctcctgagtagctgggattacaggtgtgagccaccacgcccagctaatttttgtatttttagtagagaccgggtttcaccatgttggccaggctggtctcgaactcctgacctcatgatccccctgccttggcctcccaaaatgctgggattacaggcgtgagccacctcacctggcctttttttttgagatggagtctccctctgtccccaggctggagtacagtggtgcgatctcagctcactgcaacctctgcctcctgggttcaagtgattctcctgcctcagcctcccaaatagctgggattataggcccccccacgacgcccagctaatttttgtatttttagtagagacggggtttcaccatgttgtccaggatggtcctgatgtcttgacctcatgatccacctgccttggcctcccaaagtgtgagattacaagagtgagccactgcgcccagccaaaatattgttttaaattagccagatgtggtggcacacacctatattcccagctactttggaggctgaggtgggaggatcacttgagcctaggagtttgaggctgcagggagctatgatcgcaccagcgtactccagcctgggcaacagagaaagaccctgtctcaaaaaaaaaaccaaaatagttatgctccttggagttgtgtccttggcactcttggttcctgagtctatatggcgggtttttgtttgtttgtttgtttttgagatggagtctcactctgttgctgaggctggagtgcagtggctccgtgtcggctcactgaaacctccgtctcccgggttcaagcaattctcctgcctcagcctcccgagtagctgggattacaggcgcctaccaccacacccgattagtttttatatttttagtagagatggggtttcaccatgttagccaggctggtcttgaactcctgacctcaggtgatccacccaactcagccccccaaagtgctgggattacaggcgtgagccaccgcgcctggcctacgtggtggttttaaaacatgtttgcaaaatttttaacattcctcctattgaaaatagtaagtctaattcccctcctcttgaatattggctggccttagtgactgaatcctcacaagtagaatgcatcaggagtgtcacactatgacttccaaggctaggttgaaaatataaaaggggtaaagctctctttcctctgtcgctctatttctttctctttctctctatccccacccttttccctctcctccctctactcacctttggaacccagccgctatcgagcccaacacacacgcaggtgccctggttaaagtcctagctagggtcccaagtgacagccagcatcaactataacatgtaaaggagccagtcttcagatgattccagcctcagccttcaggccactcagctggtgccaaatagagtagggatgagctgtccccacagagacctgcccagtgcacattgtgagaaaggtaagtattgctctctgaggccattaagtttgggggtggtttatggcataaaaattggtaattggagcactcgacttcaagggttctcaccaggtgtgtgagggtgagggtggccctgcggagtgagtggcctgtgggggctggtcatatttcatccctaggctctcccgacctggctctgccagattcttacacggatgagggcctggactggggaggaggagggggagtgcagcagcagcaagggcatggaattggctgagaaattccacaggaggccaggtgcagtggcttacacctgtaattctagcactttgggaggccgaggcaggtggatctgaggtcaggagtttgagaccagcctggccaacatggccaaaccccgtttctactaaaaatacaaaaataattaggcatggtggtgggtgcctataatcccagctactcgggaggctgaggcaggagaactgcttgaacccggggggcggagattgcagtaaaccaagattgcaccactgaactccagcctgggtgaaagagaaactctgtctcataaaaaaaaaaaaaaaaaaagaggccgggcgtggtggctcatgtctgtaatcccagcactttgggaggccaagtcgggtagatcacttgaggtcaggagttcaagaccaggctggccaacatggtgaaacccccgtctctaataaaaatacaaaaattacccggatgtggtggtgctggcctgtaatcccagctgctctgtagactgaggcaggagaagcgcttgaacccgggaggcggaggttgcagtgagccgagatagcgccaccgcactccaggccagcggacagagccagactctgtctcaaaaattaaaaaaaaaaaaacaaaaagaaactaggaaactggcaggagctgtctccaggtcccaaaaggataaagtgaaaaacccggcaggccagcagatggccaaaaaagccatccctagctgccctcattgctcattagggtaagacactctcatcagcgccatgacagtttacaaatgccatggcaatgacccagagactattgccgtttccatacaatgacccagaaattaccacccctttcctagaaagttctgaataacttgcctcttgatttgcattaacccaccccttaatttgcatgtgattgagagtggatataaatacagttgccaccaacccacaagcctggttctggcaccctgcctatgagttagccttgctcagcaaggagcagctccagttcgataaaagattgctgaagattggccaggcgcagtgtctcacgcctgtaatcccagcactttgggaggccgaggcgggcgaatcacaaggtcaggggatcaagaccatcctggctaacatggtgaaactccatctctactaaaaatacaaaaaaaattagccaggcagggtggccggcgcctgtagtcccagctactcgggaggctgaggcaggagaatggcgtgaacccgggaggcagagcttgcagtgagccgagattgcaccactgcactccagcctgggtgacagagcgagactccatctcaaaaaaaaaaaaaaaaaaaacagattgctgaagatttcacccctgaattcttttctgggcaaagccaaggaccctcttgggctaagccccggttttagggcttgcttgcctgcccctgtatttattccagaaagttctgttggacattgttgatgggtaggaccttgggcactatccagagtgtggtcttagaatcagcatcatcaaggccaggcgcactggctcgcctgtaatcacaacactttgggaggccgggtggattacctgaggtcagaagttcgagaccagcctggccaatatgataaaaccccgtctttattaaaaatacaaaaaaattagccggacgtggtagcgggcacctgtaatcccagccatttgggaggctaaggcaggagaatcgcttgaacgtgggaaacagaggttgcagtgagctgagatggcaccattgcattctggcctgggcggcaagagcgaaactctgtgtcacacacacgtacacgaaaaaaggaatcagcagcatcaggatctcctaccccctgcccctggcaattacccatctgctttctgtccctgtggctgtatctattctagacgtttcacatgagtggaatcctgccctgtcatcctttgtgcctggctgggttccggtggcctgatgcttcatggttcacccatgcgactgcacggctccttgtccatggcatggatagactgcattttgtttattcattagttgatggatatgtgggttgtttccactttttcgctgttacaagtaatcctgctatgaaaattgatgtcccagtttttgtgtggacatatattttcagtttatcttgggtatatacccaggagtagaatgctgggtcatatggtaaatctatgtttaactttttgaggaactgtgggtggcccaatttacaactgctaagttcatccacttcttactttctccacggaactcacacttacagcagtgatagctttcacacctccctcgtccgcactgttaaacactaccacaaatcaggctactgggaaaagcctggaggccaccagcctcctgcaagaaaagcaccagcaggctgggcacagtggctcactcagtggctcatcccagcactttgggaggcggaggcacgcggatcacctgaggtcaggggtttgacatcagcctggccaacatggcaaaaccctgtctctactaaaaatacaaaaattagccgggcgggtggtgggcacctgtaatcccagctactcaggaggctgaggcaggagaatcgcttgaacctgggagatggaggttgcagtgagccaagatcacgtcactgcactccagcctgggtgacagagcaagactccctctctctaaaaaaaaaaggaaaaaggaaaagcaccaacacaggtgacgcaggtcctctaggagaccgtgtctggttctcttcctgccacacgcatgccactcatgccgctgaagccaaaacacctcctcctatgtgaccagaattctgggtcattttatgatttctttctttttttaaattaaaataaaaaaatttttttagacacacgatctccctatgttgcccaggctggtctcaaactcctgggctcaagcaatcatcctgcctcagcctcccaaagtgctgggattacaggcttaagccaccaaactagacctttttttgtttttattttttagggacaaggtcttgccctgctacccaaaccagagtgcagtggtacgatctcggctcactgcagccaaaacctcctaggcttaagtgatccttccacctcagcctcccaaagtgctgggattacaggcgtgagccaccacagtagacctcctttttgttttattttttagggacaaggtcttgctctgtcacccaggccagagtgcagtggcatgatctcaactcactgcagcctcaacctcctaggctcaagtgatcctcccacctcagcctcccaaagtgctgggattacagatgtgagccaccatgcttggccccatgagacatttaaatcttcaagaagagggtccagggcttcctgttgttcttcccatcaccctcgcccctctgcagggggtcctaacgcagctaacagttccagccttcttcaggggcttcttgctgtcagcacggaataaagtcagagctgagctcaggagagttccgtcactcgccaagactggccaggtctcttctgtccttggctgtcaagattccaaacttgagaagtgagaaaaacaatgggaatgagttagaaagttcccaagtgccacctttctgaaggaattccagggtggaacaagctgggttttgcagccagttagccctaagattaaatctgagcttctctgtttaatagctgtgagagtcttagcaactacttaatttgggtgggtctgaatttctatttttcactaattcccagcgtgaatggctgtcaggggggtaatagtttatttatttatttttatttaatttaattaattaatttatttttgagacagtctccctttgttgcccaggctggagtgcagtagtgcaatctcagctcactacaacctccgcctccttggttcaagcgattctcctacctcagcctcccaagtagctggaataacaggtgtgtgctaccacgcccggctaacttttgtatttttagtagagatggggtttcaccatgttggccaggctggtctcaaactcctgacctcaagtgatccgcctgccttggcctcctaaagtgctgggattacaggcgtgagtcattgcacccggcctggataatactagtttagataaaccacttcataaagtgggtatgcaatgctttgtttcctctcaccttgacccagcattgcttgtcatctctgaaagaccacaaagagacctgcccctccacttcagggacccacttgaaacctggtcaccatccaggcttgctctgccttggccatcaggttccctgggcaccaagcctctcttttctcccgctgcacctgccagcccgtctgacagcactggatcctgcaccctggagtccgtttggactcacctgccctgaccttacttggcttcctctgtgatgttgactttatcgaccgcttttgccagcctggtctgtcggccacaccctacccataaatcttctaccttggatctatacaactgcctcccttttgtcctgtccccagggtagtgagccctccagggcctgcagccccagctgtcctgatccttttctcctgaagcaaaggaagatgtgttcatagtgtacccactgctgatctttctcctctgtccaaacatctccagtcctgtgctactgccctggacataatcgtttattttgtttttttgttcttttttttttttttgacacagagtctcactcggtagctcaggctagagtgcagtggcatgatcttggctcactgcaacctccacttcccggattcatgtgattctcttgcctcagcctcccgagtagctggaattacaggcacgcaccacctcacctggctaatttttgtatttttagtacagacggagtttcaccatgttggccaggctggtctcaaactcctgacctttggtgatccacccaccttggcctcccaaagtgctgggattacaggcatgagccaccgtgcccggcctgccccggccatattagattctgagtcttctatgtccctgacaattggctaagcacattttaatatgtcttgtatttttttttttttttgagcagagtcttgctctattgtccaggctggagtgagtggtacagtagcggctcatagcaacctctgcctcccgggttcaagcgattctccctgcctcagcctcccgagtagctgggattacaggctcccgccaccatgcccgactaatttttgtatttttagtagatgcagggtttcactatgttggtcaggctagtcttgaactcctgacctcaggtgattcgcccgcctcggcctcccaaagtgctgggattacaagtgtgagccaccacgcctggccctaacctgatgtttttatcagcatctgtaagataagacttcaggaactggtagattctgcaggagtaacatggggtgcccatagagaaggggccctcttatgaccacagcatttaccataacctgtgtaatgggcatattcagtgggtgaatattcctgtcaccacaaacccagttgcacatgacttgtatacaaagcatatcagctgcttcaccaggggtgctccaattggcgtttataggggaagttgggcagttcccttctgagggtaaacatatgtttgttttttttgtttgtttttttttttttggagacagggtctcacattgtcacccaagctggagtacagtggtgcgatcacagctcactgcagcctcaacttcccaggctcaagcgatcttcccacctcagcctcctaagtagctgggactacaggggctcaccaccatgctcagctaatttttttatttcttgttgagatgggatttcatcatgttgcccaggctggtcttgaactcctaagctcaagtgatccacccacctcagcctcctaaaatgctaggattacaagcgtgagccactgtacctggccaacacacttagcagtggcttttatccactccaccaggctatgagcatgctggcccttcatgaatattcataggtcctcttataacctgttgaatacgtacaccttgtcaacccattcagcataaattcctgtctcatctttctctccctcaaaatgatctatgccagaggctacacttcccagcttgtcaagatggccaccctaccaccgcaacccctgataggaaataatgtctcctctccaaatttgtagatatctgtgtttgtttgtttgtttgtttttcctgagatggagtctcaactctgtcccccagactagagtgcagtggcaaaatcttggctcactgcaacctccgcctcccaggtgcaagccattctcctgcctcagcctcccgagtagctgggactacaggcatgcgccaccatgcgcagctaatttttgtatttttggtagagacagggtttcaccatgttggcaggctggtctcaaattcctgacctcaagtgatctgcctgccttggcctcctgaagtgctgggattacaggcatgagccaccatgcctggccagatctccagattttaagttgatgccttagaatatcacattgtcgtatgttctagacagtgatcactcttctgaggaggaaaactaataaagggaacaaagggcaaataaattaaacaaaggtcaaaaccaaagcattgcagttgcaaagcaattcagtaggagatgtggaaattgtgaagcagaaactccaaagttaaacaaagttaccatgtaaattacaccacaataaaaacaaacgaacaaacaaaaaacagaaagttaaaaccaggagcttcagttgtccaaatcaatggacataaaattcttcttccagtcttatgatgcatttgacaagatctccagtatctactcaagttaacccatgaaatatagctaatggtagatgagtaagataaaggctgtccagatctttatctgaaagaggccgaaaagaaagaccagagtatttcgtgaaaatctgaagggagaataaaaatttcacttactacctaccacgtgccaggcctgtaccagggggttgaaaaaaattggtgggtcttattatctccaatttacagatgaaaaaactgaagctccaggccgggcacagtggctcatgcccttaatcccagcactttgggaggccgaggcaggtggttcaccagattaggagttggagaccagcctggccaatatggtgaaacctcgtctctactaaaaatacaaaaattagccagatgtggtggcacttgcctgtagtcccagctactcgggaggctgaggcagaagaatagcttgaaccagggaggcgggggttgcagtaagccgagatcacgccactgccctccagcctgggcaacagagtgagactccatctcaaaaaaaaaacaaaaaacaaaaaaaaaactgaagctcagtgggttacatggtaggtaagggctggagccaggtgttaaacccatgtatctgttaaaattaaaacttaagacaaattaaatttaagagagtttaattgagcaaagaacaattcacaaatcaggcagctccctgaaccagcataggttcagagaaactctggggctgccatatggttggataataattatagacggaaaaaggaaagtgacatacagaaaatggagatgaggtacagaaatagccagattggttaaggtgtggcacttgccttatttgaacatggtttgaacagttggccacttgtgatgggccaaaactctgtggttggtataagagaaggttatagtctatttacatgtccagttaggccactaggtgaggagaaacctttaggcctaaattaaaatatgtaaggaggcagctttaggctaaacttaatttaacaattctcttggccatgcgcggtggctcatgcctgtaatctcagcactttggagggccaaggcaggcggatcacctgaggttaggagttcgagaccagcctggccaacatagtgaaaccccatctgtactaaaaatacaaaatttagctgggtattgtggcaggcgcctataatcccagctacttgggaggctgaggcacgagaatggattgaacccaggaggtggaggttgcagtgagccaagattgtgccgctgcactccatcctgggcgatagagctaagctcagtctcaaaaacacaaacgaaaacaaagaaaaccaattatctctttttggccaactttcaattttgagagattgataaaaagctttaggcattgatgtcactctgtcaccaccgtgaatggacttttttggtctaaaatcccactaggaaacatagcagtgggttttgtaaggtgggaataaggaaatagagcaataaggaaaaacctcgttattccaggttacttttttgggatgggttggagcagaggggagcttcttattatgctggaatttgttttcaggaggaaaaacctggtctgttttgggatctctctgctttctttgaagtttgagtttgattatgtagcatttagcatgggtgactccattttggtttggtcttttggggtctagttcaggagctcaggccagaaaaacagcctcccataactttacttaacatctctttataacattctgtccacaaatgcttggtacgtggctataggtttctggcttaaaaaatgattaacaatgtacccttacctaccctgaatctgagcccctgcagcctctctcatactactgtggccacccaagctgccctgaggtttcccaaccaaggtggctcacatccgtattcccagcacttgggaggctgacgtgggaggatcacttgagcccaggagttcaagaccagcctgagcaacacagtgagacttcatctctacaaaaagtaaaaatgcaaaaatttgctggggggtggtcccagattcttgggaggctgaggtggaaggatcaatagagcccaggaggttgaggctacagtgagctgtaatagtggcactgcactccagcctgaggtacagagtgagaccctgtctcaaaaaagaaaaaaataaataaaagtgaataagaaagcaaagaaaacccaatacaaaccctgcaagaagagagacagagaggtgaggaaagacaaaggaggaacggttcatagaagtctcgttgtagcctgggcccaaggtgctgtattcattggataaccatccacggatgcttactctgtaccaggtgtgatgccagatgctgggaatttggagatgactgagtcatggcccctgcctgagaatgagctctcagtttagtggagaaggcttacatgtaaacatataaattatagtgcagggtaattagaaccataatagagtaatgtaggaaacacacagaagccaaagaaaggaatgatgaattctatttgaagaggaggagctgggaggagaagagagctgaggccttcctgtgagaagggtgggtggtggtgcaggctggtggtggtcccctctgaataacctggaggttgccaggtgggcagaaggaggagagcattttaggcagctggagtgtgcatgggcagagttgaagattagcaattgcaggtcactgtgggcggagagcaggactccccttggcaacctggtgaagtcacttctgcccattactttattcattggaacaactaagagtgaacagaaaagcagcgctcatgccgtcagacccttcttccaaatgaaaacgtgcaccaaggcccagtgtataaataggaagcagataatgtttttttcttaacaggaaacagatctcccactgtttggaaatatattttgaaactttttttttttttttttgagacggagtttcactcttgtcacccaggctggagtacgatggcgcgatcttagctcactgcaaactccacctcctgggttcaagcgattctcctgcctcagcctcccaagtagctgggattataggtgcctgccaccatgtctggctaatttttgtatttttagtagagacagggtttcaccatgtttgccaggctggtctcaaactcttgacctcaggtgatctgccagcctcagcttcccaaagtgctgggattacaagcgtgagccaccgcaactggccaaaacatttttattattttattttatttatttatttatttgagacacggtcttactctgttgcccaggctggagtgcaatggcatgatcataactctctacagcctcaaactcctgggctcaagcaatcctccgacctcagtcctccaagtactgagactgcaggtgtgtaccactatgcccagctaatttttttttttttttgagatggagtctcgctctgtggcccaggctggagtgcaatggtgcgatctctgctcactgcagcctctgcctcccgggttcaagccattcttctgcctcatcctcccaagcagctgcagcagattacaggcatccaccaccatgcccggataatttttgtatttttagtagagacaaggtttcaccatgttggtcacgctggtctcgaacttctgacctcaaagatctgcctgccttgccctcccaaagtgctgggattataggtatgagccacagtgctcagccctcaaataatttttttaaattagttttttagtttttgtggggatgggtggggggggtcttgctatgatgaccaggctggtctcaaactcctggcctcaagctatcgtcctgccttggcctcccaaattgctaggattacaggcatgagccacaggtgtcggaaaccttctggatgggggtggagaggcagatccccaccacaggtctgaaattgcatcaaaactttgaaaagagggcaaagctgcttcacctgagagagggaggagctttcaggggaattctagatgggaggggagaaggtcacaccacatctgccatgcctgtctccactcttaccctgcccaagtccctcctccactttatcaaaatcaggagagagcaatccttctaaaatgcaaatatgagcatgtacccctctgttcaaaacccttccatgtctcccctcactgtgagaaaagaagccaaactcctccaggccgggcgcggtggctcacacacctgtaatcccagcactttgggaggccgaggcaggcggatcacgaggtcaggagttcgagaccatcctgccaacatggcgaaaccccgtctctactaaaaatacaaaaattagctgtgcgtggtggcgcatgcctgtaatctcacctacttgggaggctgtggcaggagaatcgcttgaaccagggagtcagaggttgcagtgagctgagattgcatcactgcactccagcctggtgacagagtgagactccatctccaaaaaaaaaaaaaagccaaactcctgaccacacctctcaggctctgcacactctgcccactggctgctgcccaggcctcacaggtcggcttccctcatttccctccagccaccctcctctcttcattatttccaaattcatcacactttcagcttgttatctatggcagataacctcattatggcagaaaataagactgaagcatgtgaccaaacatagacagactttttcacaagatagtcagtctcttgggcttattcaaattccaaagagaatcatttacaagttaattcctatctttcgggtccattcatttctccttttaaaatattttttttttgtttatttatttatttattttgagacggagtctcgctctgtcacccaggctggagtgcaatggcatgatcataactctctgcagcctcaaaatcctaggctcaagcaatcctctgacctcagtcctccaagcactgagactgcaggtgtgcaccactatgcccagctaattttttttttttttttgagacggagtctcgctctgtggcccaggctggactgcaatggtgtgatctctgctcactgcagcctctgcctcccgggttcaagcgattcttctgcctcagcctcccgagtagctgggattacaggcacccgctaccgtgcccagctaatttttttgtgtgtgtttttagtagagatggggtttcaccattagccaggatggccttgatctcctgacctcatgatccgcccgcctcggcctcccaaagtgctgggattacaggcgtgagccactgcgcccggctatttttttgaaacggagttctgcttttgttgcccaggctggagtgcaatggtgcaatctcggctcactgcaacctccacttccctggttcaagcgattctcctgcctcagcctcccaagtagctgggattacatgcatgtgccacaacacctggctgatttttgtattttttagtagagacggggtttcaccatgttggtcaggctgatctcaaactcctgacctcaagtgatccatccgcctcgggctcccaaagtgctgggattacaggtgtgtgagccactgcacctggccccattcatttccccacaaaatcacatactacctctcaacattgctgcacccccatttcccctcccctgtgaagaaggcagctacataagcatctggaccacgttgggttattaggtcatcgttctcctgtggtttccttatgcttgtacatgtgacataaattttgtacacatttttctcctattaatttgccaattgtcagttcctttttggggagcctttatagggctagagagcagaaaggaagctttcccttggccctacagctccttgaggtcggctgttgactcttttcttcattgctgtctcttcagcgtctagaatggtacctccaatgtagagatgcttgataaacgtgttgagccgggcacagtggctcacgcctgtaatcctagcactttgggaggctgagggtggatcaagaggtcagagttagaaacaagtctggccaacatggtgaaaccctgtctctactaaaaatacaaaaattagcaaggcgtggtggtggatgtctgtaatcccagctacttgggaggctgaggcaggagaatcgcctgaacccgggaggtggaagttgcagtgagccaagaaagggcagcagagcaagaccccatcttgaaaaaaaaaaaaaaaacaagcaaacaaaaaacaaaaacaaacaaaaaaacatgtgttgagttgctttctgtttagtagcagaaagctctggaagggctttggacattcacgcgtgcaggcccgggaacgggatgaggtttaaggcaacttcatctagagtttaaaaggggcaggtaggcccacagctggcacgtgggttaaatgtaaagtggctcaaacaggatctgataaggcagaagcagagatgggggcctggtgtctcactgccttcacgttcttccttctgcctcagtccccacatgagagtgcaccctagaggtgccagcattagcgatagggcagctttccttgtttctgggatggacagaaaatgggccttgagacccctcccatcataggaaagcatctcttgcactctggagactgaggacttgctatagtggaacaagaagcagtcttcggcaatggaggagatgctggatctccatacaggcagggtgggtgcaacggagtggagctgtggcaaatgtgggtgcctctgtcctgagggtcctggatgtgtcatgcctgggaacatgagggcgttcttccaaggtgcccatctcgacctctctgagctgccatctttgacttcctgtgtttggtcacagactaggggtggtctgtccctaaacagaagaagacaagcaaggattagagaggagaaagagctagagagagagcttgggagagatgtagggacaaggaaagaagaggcagaaggaaaaaggcatggagggaaggaatataaaaaaaaaccccttaggccaggcatggtggctcacgcctgtaattcccgcactttgggaggccaaggtgggtggatcacctgaggtcatttcaagaccagcctggccaacatggtgaaaccccatctttactaaaaatacaaaaattagccaggcatggtggtgggtgcctgtaattctagctactccggaggctgaagcaggagaatcgcttgaaccctggaggcagaggttgcagtaagctgagatcaggccactgcactccagcctgggtgacagagcgagaatctatctcaaaaaaaaaaagaaaaaagaaaaaaaggccgggtgtggtggctcacgcctataatcctagcactttggggggctgaggaaggtggatcacaaggtcaggagattgagaccatcctggccaacatggtgaaaccccatctctagtaaaatagaaaaaattatctgggtgtggtggtgcgcacctgtagtcccagctactcaggaggctgaggcaggggaattgcttgaaccctggaggcagaggttgaagtgagtcgagatcgcgccactgcactccagcctggcaacagagcaagactccatctaaaaaaaaagaaagaaagaaagaaagaaaaatcctccccagagcagggaaagatgaagacataaagggaaggagagtcaccaggaaagagagagggagagagacacaaaacaaaatggctggaatgaggtgaaagttatagtagcaggatgtgctgacactgaccttggagaaaaagagaggggaagggaggagtgaacgtggaatctttggctgctgttctgtttcactcccagaactcaccaccctggattccccccatttccagatcctcaggcgggactgcctttgctatctgggatgagtcattggccccagatggtaaacctgtgaggggtggggtgctctgaatgcctgactagtcatttataattgagagcacttattccagccccttctggtcctccatccttccctcttcttggacctcctgattcagagaggtcagagggccagtccaggaggggtcaggcactaggtccctggagtcagtcttagggattttaggcagagaggaatcagtcctgaaaatgaagggcatacagagaaaaaaaaaactatgacatcacccctgggggtgttacagacctaagaaagaagcaatggccctgggcggcctacagccccaggaagattcagccatggtacccaggagacttgagggcccaaagcccagaattacccccagaggaacacctgtagaccttcggatccttagctttgcacttcccattggactgactctgtttcctgtggggcaataggcacgtgttcactgtgcacctgcagccccagtcatccttctcagagagaaatggtttgggaagtgtttggcatattggggataaatagatgagtggatagaaaaaaaaatgcaggccaggcacagtggctcacgcctgtaatcccagcactttgggaggccgaggtgggcggatcacgaggtcaagagatcgagaccatcctggcaaacatggcgaaaccctgtctctactaaaattacaaaaattagctgggcgtggtggcgcatgcctgtaatcccagctactcgggaggctgaggcaggagaatcgcttgaacctgggaagcagagattatagtgagccgagatcgcgccactgccctccagcctgagggatagagcaagactgtgtctccaaaaagaagaaagaaaaaaaagcaattacagcaaaatattaaccatagtagaatctatacagtggttatataagtgtccactatacaattctttttttttttttcctttttttgagacttgatgtttcgatcatggctcactgcaactttgacctcctcagctcaagtgatcctcttgcctcagcctcctgactagctgggatcacaggtgtgcaccaccatgcctggctaattgttttattttttgtagagacgagatctccctatgttgcccatgttggtcctgaactcctgagcttaagcagtcctcctgctttgacctctcaaagtgccgggattacaggcatgagccactgcacccagtcttgctatacgattcttttgttttttttttttttttttttgagatggagtctcactctgtcgcccaggctagagtgcagtggagtgatctcagctcactgcaacctctgcccctcaggttcaagtgattctcctgcctcagtctcctgactagctgggatcacaggcacctgccatcacacccagctactttttgtatttttagtacagatggggtttcgccatgttggccaagctggtctcaaactcctgacctcaggtgatccagctgcctcagcttcccaaagtgttggattatgggtgtgagccactgggcccagccactgtacaattctttaaacttttatatgtgtttggatttttcataatattagaaaagggaaagaaaaaaatgtctggcaaatagtcagcactcgtaagtataagattttgggaatatattcccttctgggagaatccacatttcgaatgcctgggaagggctctgtttgtcctgacagatggcagatttcaggtgagagcacctactaagcctagaggtgataagctactttgcccacctagagctgctggtggtgaccttaagtttactatgtttctcctggtatacggcacttggcccagagtggactccagcttgccacctgtcacccaggctggagtgcagtggcgtgatcttgtctcactgcagcctcaacgtcctgggctcaggcgatcttccctacctccctcctgattagttgaggctacaggtgctcgtcaccatgcccggctaatttttgtttttgttttttgttttggtagagatggggtctcacactcttgcccaggctgagctagaactcctggcctcaagcgatctgcctctgcctcccaaagcattgtaatgacaggtgtgagtcaccatgcccagccaggaactcagagaatcttaccctatgctgtagtatctgttgactatggggtagaggcaggataaggtgttccagaccctgcctgacacctgatccgaagaggttgctcatgtttgctcaggaggtgaggttcacacaataaagggcaggaggagggcttggacctggtataaaacatctggaagtttccagggggctgctttgcatctgaaactgtcaggtgaggggtgacagagatgcctgaatctgagttgggggggaattcaaatctgagctggcgaagaggatgcctggaaggaatggcaggaaagacttgagttaattggcgcttctgggtctgcagtaatcttaggtgcaaagctgtctaggtctctgctgaaggactggggacacctgggatgttcaggagaatagaaatggccagatgtgtgttagtggagaaaagaatagtgacacatagaccaggcacctggggtctaatatcttgagctggtcccgactccttctgcaacttctctgtctgtcctagttccaccagcactgcttggatactggtgctggcacagttccttctgtcaccaactttgctccccaggtaacatagaggcaactctaaaatgcttctttccttgagaccaggtggatgccagggatttaaaccatgctccaggtgccccataatccaggccaattcaccacagatgatgaggctttctttgctcagcctctgggctcagtaaactcagccatctctttgcttgggagaggtcctctactccctccttagaaaactcgtttcctggctatggccataccaacccaaatgtacctgggcttggctgacttcagaaaacttttctgctttgtgccaggatggaataaggcttaatccagatagttagagttcatcttcaggcctgagagaaaaagaggagggcttggctacagccagaccagggagagctggaggggtcagggacattgaaggtagcatcagagaggaacaggactacaggctatggacagtcctttctaagctcaagactgggtctgctaggtctaagttgaaggacgaagaaggcttggtctgagctgcaggtcaggagtgcctgggtcaatcaagtcaacaaggaagaaggtgaatcttcatttgctcttttcttcccactccagccccagaatgttgacagtcgctctcctagcccttctctgtgcctcagcctctggcaatgccagtaagtgagataccaggagcctggtattggggacttgggaaggcagccttgggcactgctgttggccaaggcttttggaggttggcttggggtggggagctgagttgtcggaggaacaggggtgatgcagagaaactgaactcctggaagatttctccctccaactcctgcttgcccctccagttcaggccaggtcttcctcctatagtggagagtatggaggtggtggtggaaagcgattctctcattctggcaaccagttggacggccccatcaccgccctccgggtccgagtcaacacatactacatcgtagggtaagattctttgaattcctggctgggcgcggtggctcacatctgtcattacaatgctttgggaggcagaggcagatcgcttgaggccaggagttctagctcagcctgggcaagatgccagggatgccagggatttaaaccatgctccaggtaccaagaccccatctctaccgaagaaaaacaaaaaaattagccaggcatggtggtgagtacctgtagcctcaactactcaggagggagaggcgggaggattgcctgagcccaggatgttgaggctgcagtgagccaagatcatgccactgcactccagcctgggtgacagagtctctttgttggcaaaatgagttgaagttccctgtaggatcttccagggttcacccaggcttcacagtctgtaggactagccagagacctctcatccctatcatcacctttctttctccttccttcctcccctcttcctcagtcttcaggtgcgctatggcaaggtgtggagcgactatgtgggtggtcgcaacggagacctggaggagatctttctgcaccctggggaatcagtgatccaggtttctgggaagtacaagtggtacctgaagaagctgttatttgtgacagacaagggccgctatctgtcttttgggaaagacagtggcacaagtttcaatgccgtccccttgcaccccaacaccgtgctccgcttcatcagtggccggtctggttctctcatcgatgccattggcctgcactgggatgtttaccccagtagctgcagcagatgctgagcctcctctccttggcaggggcactgtgatgaggagtaagaactcccttatcactaacccccatccaaatggctcaataaaaaaaatatggttaaggctagtctgtgtgggggcatctgtggctgggatatctgcctcctgacttagccggggacgtgcaaatctcacttctggctggctttggacatctgtctggaagatgggaagatgagggagaggtatgtaagaatcctgggctttgtgctataatttatcaagaggagatgagattctggcttgcatcaacgctcttcaaggacagctccttggaacattgatccaaactggagtcatgggtctgagggcaaggcctagttgtggcttacaccaaaaccccagatgtcccactctccagctctcctcacccctggtcctccccttgagaaagtggtgaactcacttgctgtgtgtgggtggccaggaccattagcctttgttctttcccagaacccacctgactcctgaaacttagctgaagtctgtgcccgaggaccctgccctgttaccaggcccagttcctcctcacctctacccatgagccccggtgtcctgctaagccctctcagatctgggattcctccttcctcaggaagccaccaccttctcagcagtggaaaccctgcccacactatgctcttaggctttagccatcagaaggttacagtggactgcgggaggctgacactaggctgaactcattaaggaatgaatgggaggtgagaagacacaggcagcaagaatcgagtgtttcaagaagtttggctgtggtttgccagaaataggcaagtcagttttcgggggtgtaaggaaaaagggttttgtgtctttttaaaatcctagacaggagagtcacaagcatgttcacatgataaagaggaagaaagagaaagaggctggagattctgaaaagagatcactggtgaggtctcaaaagagatagaagaggatggttatgtagttggggaaagaaattttaagaagggaagaaaattaaaatgagtgaaggtatacgttagttttgtaaaagttatcaatatctggctgggcacagtgctcacacctgtaatcccagcactttgggaggccaaggcaggcagatcatttgaggtcaggagttggagacaagcctccaacatggtaaaaccctgtctctactaaaaatacaaaaattagccaggtgtggtggcagtcacctgtaatcccagctacttgggaggctgaggcatgagaatcacttgaatgctggaggcagaggttacaatgagttgagacagcacaactgcaccccagcctggatgacagagtgagactccatctaaaaaaaaaaggaatgttatcagtatcaaaatggagtaacatatgtcacatcctaacaaaatggaaccaacctgacacctaaattaagcattgcacctgataacaccatggaggactgggtggagaatcagcagacaatggcagggagaggcagtctgtggaccaagttcaggtgaaaggatcacccatcatgttgggcatcagatcaggcaggttcacacactacctgaggaagctggtctttgtgacagacaagagctgctctgcctcttgggaaacacaggcaccagttttagtgccatcttcttgcacccaaatgctgtcctttaactcatcagttacagtgctggatccctcatcactgccaatacggggctagcaatatgtctgccccagtgaatgcagccgccacggagccccagcctcctctatggcaggggccctgtggtggggaatgaggacttctctatcattaacctccatgcagttggctcaagaaaaggatatggtagttgggcaagggggctcacacctgtaatcccagcacacttgtaatcccaggagggtcgcttgagcccaggagtttaaggccagcccgggcaacatagcaacctgtttgtaggcaaaatgaggagttgaagttccccgtaggatcttctagggctcaaccagccttcatgtgcagtgggactggcaagaaatctgtcatccctgttaccactttgaaggtctcagtgtgtatgcaggtcctgaaaagttcaagtcccacctgaaacgcaacacagcatcatgctctgattcatcagtgattccctaatcaatgccattggcttgcattgggactatctatcccagcctatccagtgacttcagcagctgcagagccccagcctcttctttggcaggggcactgtggtgaggaggaaggattcccttatcacaaatctccatccaattggttctataaacagatatggtggcccaactgttgcgggaagtcagggaccccgaacggagggactggctggagccacagctgaggaacataaattgtgaagatttcatggacatttaccagttcccaaaattaatacttttatactttcttatgcctgtctttactgcaatcactaaacataaattgtgaagatttcatgaacatttatcagttcccaaataatactcttataatttcttatgcctgtctttattttaatctcaatcctgttatcttcataagctgagaatgtacgtcacctcaggaccctgtgatgattgcattaactaacaaattgattgtaaaacatgtgtgtttgaacaatatgaaatctgattgtaaatgtgcatttgaacaatatgaaatcagtgcaccttaaaaaagaacagaataacagtgattttagggaacaagtgcagaggttacaatgagttgagatagtgcgactgcactccagcctggatgacagagcgagatttcatctaaaaaaaaaaaaaaaagaatgttatcagtatcaaaatggagtcacatatgtcatatcctaacaaaatggaacaaaaagggaagataaccataaggtctgactgcctgcggggtcgggcaaaaagagccatatttttcttcttgcagagagcctataaatggacgtgcgagtaggagagatatcgctaaattcttttcctagcaaggaatattaaatattaagaccctaggaaaagaattgcattccttggaggaggtttacaaatggccactctgggagtgtctgtcttatgctgttgagataaggactgaaatatgacccggtctcctgcagtaccctcaggcttactaggattgggaaattccaacctggtaaattttggtcagaccggttctctgctctcgaaccctgtcttctgttaagatgtttatcaagacaatacatgcacagctgaacataggccctcatcagtaattctaattttgccctttgtcttgtgatctttgctttgccctttgccttgtgatctttactggcctcagaagcatgtgatctctgtgacctactccctgttcgtacaccccctccccttttgaaatccttaataaaaacttgctggttttgcggctcaggtggggcattatggacctaccgatatgtgatgtcaccccccaccagcccagctgtaaaattcctatctttgtactctttctttttatttctcagaccggccaacacttagggaaaatagaaagaacctacgctgaaatattgggggctggttcttctgatacccaacaccatggctcacagctgtaattccaacacttccagaggccaaggcaggaggatcacttgaaccttggagtttgaggttgccatgagctatgattgtaccagtgcactccgacctgggtgacacagtgagaccttgtctctaataagaagaaaaaaatgccattttaaaagtgtacactttcatggtttttagtatattcactgtattgtacaaccattaccactacctcattccagaacacttccaccacccccaaaagaaagcagttacatctgttcactgtagtgccaattactcaaccccttgtcatcccctggcaaccaccactcaggtgtactttctatgtctgtgggtttgctattgtaatttgaaagttcactgatgttactttaatttggtttcattttgaatacagtaaatatggatcaaaacccatatatacggagcatctttagaggcctcatttttgtttttttttttttttttgagatggagtcttgcactgttgcccaggctggagtgcagtggcgtgatctcggctcactgcaacatccacctcccagattcaagcgattctcctgccccagcctccccagtagctgggaatacaggcgcctgccaccacaccctgctaatttttttatttttagtagagaggggttttcactatgttggccaggctggtcttgaacgcctgacctcgtgatgcacctgcctcggcctcccaaagtgctgggattacaggcgtgagccaccacgcccaggctagaggcctcattttttaagactaatgggatcccaaggctaaacgtttgagaaacactgatctaagatttgtgttttgttttgttttgttgttcaatcaagtggaacataatgtctaaaccagggccttacctacctggaactcaaaggtggaatgaccttccctggccaagcttccagaagggacagggagctacttaacagactgctggacccttaacgactggaaaccggaaccgtgggtgacggaaccgaccagacgtgacagccctttggctggggctgcagtcccacgatccacacaacgactctggctccgcagacgcgccaaccacccacggaggcaagaaactgccgagagtgaagggaaagggagcccagtgctgggcggcactcagcagctcccccagcggccactgtcgccaacgtctccgcgtcggggtttgtaccgcagctcgcgtccagtcgtcaatggctgcgaggcccatgcgcgctccagcgtcctgaccaggggaacgttttccttagggacccggaggcgagcgctggagggagggatggttgctaacgcaactctctgcagggcagacccaccagcacccgcacgcaaactacgggctggagcagtctaacagaaactctctcaaagtcgctcacgggttgccattctaggtaagatttgtgaataaaactaattctttaaaagcctgagtttttctttagttgacagttttaattaacatactcttttctttcctcttctgcagacccagcctcaccattccaatgaagacatcaattaacccatgcacagccgctacaaacggggagctcattgcctgcagggaaggaccctctacagagagctacctgggggctgggaagcaggaccccaggctgagtcctgccttttggtagtgccccgccccggccaatgcggctgttatatcaaagtacataaaagtgaaggcaaagggtgtccacgtgggatagactggcatagcttcctggccacccatggtgctccattatctcttcgaggaccccttctccacgagaccctccaggtctggtcctctatcgtccagcccccattctcttctccatcactgctgctgtgtcccagatgaccttaatttaatcttcacatatttgaaggacagaatcatcggcctcacccactaattattattattattattttattttattattattattttttgagacggagtctcgttctgtcacccaggctggagtgcatcactgcaagctccgcctcccaggttcacgccattctcctgtctcagcctcccgagtagctgggactacaggcgtccgccaccacgcctggctaatttgttgtatttttagtagagacggggtttcaccgtgttagccaggatggtctcgatctcctgacctcgtgatctgcccgcctcggcctcccaaagtgctgggattacaggcatgagccaccgcgccaggcctagacccactaattatcttttatggcacaaactctatgttttacttttgcccaggctggaatacaatagcggcatgatctccgctcaccacaacctagcctcctgggctcaagtgatcctcccacctcaacttcccaagtagctgggagtacaggcatgcgccaccacacttggctaattttaaaatgttttgtagagaagggtctcactaggttgcccagactggtcttggactcctagacccaagctatcctcccaccttagcctcccaaagtgctgggattacaggaatgagccactacatctgacctcctttgcttcttttaaagacatagtttggaatttttttttttttttttttttttgagacagagtctcactctgtcgcccaggctggagtgcagtggcgccatctcggctcactgcaagctccgcctcctgggttcacgccatccttctgcctcagcctcccgagtagctgggactacaggcgcccgccccacacctggctaattttttgtatttttagtagagacggggtttcaccgtgttagccaggatggtctcaatctcctgaccttgtgatccgcccatctcggcctcctaaagtgctgggattacaggcgtgagccatcgtgagcagcctttttttgaggagtctccaactgtcacccaggctggagtgcagtggtgccatctcggctcactgcaagctctgcctcccgagttaacgccattctcctgcctcagccttccgagtagctggaactacaggcacccgccaccacgcccagctagttttttgtatttttagtagagacggggtttcaccgtgttagtcaggatggcctcgatctcctgacctcatgatctgcctgcctcagcctcccaaagtgctgagattacaggcgtgagccactgcacccggcctggaagttattttttaaaaatcaattgtttctttctctgtcatcccagcaggagtgcacaggcatgacctcagctcactgcaacctccacttcctgggttcaagcgatcctcctgcctcagtctcccaagtagctgggactataggcacatgccaccacatctggctaattttttttctttcagatggagtcttgctctgtccctcaggctggagtgcagtggtgcaatctcagctcactgcaacctccaactcctgtgttcaagtgattctcctgcctcagcctcctgaatagctgggattacaggtgtgtgccaccacgccggggtaatttttgtgtctttagtagagacagggtttccccatgttggccaggctagtgtcaaactcctgacttcaggtgatctgcccgcctcagcctcccaaagtgttgagattacaggcatgagccaccacgcctggccaaaccaccctaatttctaccagccagatgcagatccttaaaacaaccctaggaggtatttcaaccattattcccttttaatatctgaggaaatggaggcacaaagaggctaaatctctggtctgggcagcctggcaccaaggccctgtacctaaatggtttattcaaacatagaagccctatctccttgatctatgctcttttcactatttctggcaggtttcttaccaaatatctggagttgacaacaaatgtgaaaactgaacagccttttctgacaggcaaggaagaccaaactgccaattgccaatgtcagatgttctcaaagtatggtccagagacttctgggagtccctgagacactttcagtgggtctacaagttcaaaactattttcataataaaactaagataccaattgacttctcttgcattgtttctcaagtatatagtggagtattcaaaatactatattatatgtgacatcacaacagcatgaatgcagaagcagatatgagaatctagtttttttgtgtgtctttgagacaaggtctccctctgtcactgaagccagagtgcagtggcaccatcacggctcactgcagcctcaaactcctgggcttaagcaatcctcccacctcagcctcccaagtagctgggaatataggtgtgtgccaccatgcctggctaattttattttttaagagatggaggtaggccaggcacagtggctcacgcctgtaatcccagcactttgggaggccgaggcgggtggatcacgaggtcaggatatcaagaccatcctggctaacacggtgaaaccccgtctctactaaaaatacaaaaaattagccgggcgtggtggcaggtgcctgtagtcccagctactcgggaggctgaggcagaagagtggcgtgaacccgggaggtggagcttgcagtgagccgagatggcgccactgcactccggcctgggccacagagcgagactccgtctcaaaaaaaaaaagagatggaggtctaggcagggcttggtagctcacgtctgtaatcccagcactttgggaggccgaggcggatggatcacctgaggtcatgagttcaagaccagcctgaccaacatggagaaaccccgtctctactaaaaacacaaaatcagccatgcacggtggtgcatgcctgtaatcccagctactcgggaggctgaggcaggagaattgcttgaacccaggaggcggaggttacggtgagctgagattgcgccactgcactccagcctgagcaacagagagagactatgtctcaaaaaaaaaaagtgcacacctctctggtttttagtatgtttattacgttacgcagccatcatcactacttcattccaaaatatttaatatttccatcacccccaaaagaaactcgttatatctattgctgtagtgccagctcctcagcccctcaccatcccctggcaaccactacttagatgtcctttttatgtctatgggttttttactgtaatttttaaattcattaatgtcaactttaatttagtttcacttcacacacagtatatacggccaggcctggtggttcacacctgtaatcccagcactttgggaggccaaggcgggtggatcacttgaggtcaggagtttgagaccagcctggccaacatggtgaaaccctgtctccataaaaatacaaaaattagctgagcgtggtggtgcacacctgtaatcccagctactcgggaggctgaggcaggagaatcacttgaacccaagaggcagaggttggagtgaaccgagattgagccactgcactctagcctgggagatggaagtgaaaccccgtctcaaaaacaaaaaaacaaaaaccctcatatacacaaaacatctttggaggcctcatttttaaaaactgtagtgggatcccaaggcaaaacgtttcagaaacactgatctaagatttgtgttttttgttttgagacggagtctcactctggcgccgtggctggagtgcggtggcaccatctcggctcattgcaacctacacctcccgggttcaagcgattctcctgcctcagcctcccgagtagctaggactacaggcgtgccaccatccccggctaatttttgtgtttttagtagagacggggtttcgccatgttggccaggctggtctcgagctcctcacctcaggtgagcctcccgcctcagcctcccaaagtgctgggattacaggactgagccaccgcgcccggcccgtgttttgttttgttgttcaacagggtggaacataatgtctaaacctgggccctacctacctggtgctcaaaagtggaatgaccgtccctagccaacccttcagaaaggacagagagctactcaacggactgctgtactcttaaggactgggaaccggaaccgtgggtgagtgggactgaatcacagactaagcgttttccacgcttcgccgacgtgctgagtgccaagttataaagacaggaacatccaagctgctctcctgggctgacacggacgcgaggggacctacagtggccttgggcccagcaggcagcgactgcaacgtgactgcccagagtccagcccctggggcccagatctacagaaccgaccagacgtgatagccctttggctggggctgcagtcccacgatccacacaacgaccctggctccgcagacgcgccaaccacccacggaggcaagaaactgcagaaagtaaagggaaagggagcccagtgccgggcggcgctgagcagctcccccagcggccaccgtcgccaacatccctgcgtaggggtttgtatcgcagcgcgcttccagacatcaacggctgcgcggcccacgcgcgcgcatgcgtcctgaccaggggaaccttttcttggggacccggaggcgagcgctggaaggcgggatagtggcgacccacacgcagcagcttccggcggcgcgtagtcttgattggtggaacctgggagagggggcggggcaccggggaattcgaatgggagaggcgggcccaaggagggagtggaatggccgcgggcggctcgacgcagcagaggcgacgcgagatggcggcagcttcagcggcggcgatctcaggtacttgagcccggcctgggcaaggcgggtaccgacgtctggagtttagtgggagttatgtgtcggagtgtggtccaggctctgcgggttgtcgcggagaggcggccatggcgcaggggcggggagagggggacggtgagagtgtggggtcgcgagccggtcgccccgcctggctcctgccttctccctgtttcctgctctccccttgggtcagtagactcgggtctccggtccaggctcttggcttgaaccccgcgcactttttctttgtgagcttcggtttcttcgtctgtgaaacgggggtcatggcctcatccctggagatcacctgaataagcaagagaagagtggcggacgctctagccacgaggacgagaagaagggagccggaggcgtgtattgggaagggttctgtgtgggacatggtgtttgggtgcagagacatccctgagagatgcaagaggacgggctgaggaacagacccggctgctgctgggtttgagttggcagcgtaagatgctctgcgattacaggaaaacgaaataaaagactaaaatttcctttcactctagcatggaagtgaatgctattttagggttggaaaggctgttaggacacccaaaatcttgtatgtgagtatttgtttacatgtgcctctctaacccggagacttaatcctcgttagtgatgatggtgagcgccatagtaattcactggagccctcgttagcctcgtggggaaacagacatttaggagaatgcctaacacatgtagagctcttgctatgtgccaggcacagttgtaggcattttatggtggtgaaccatttattgtccacacaatgctatcaggttgttactattactgtctttgttttacacaggaaactgaggttagtttgttcagagttaacacaactagtaaatattggggcttgaattcgctctcaaggagtctgagtgtagaacctctgctcttaaccattatgcccaagtacatgttatccctgctggctgagcacagtctccccttacccttcgaagatgcactgtgtccggtgcatggtagatatgaaaatgcctgaatgaataatgtcccttcctcgaggaatttacagtctgtttcaatagagtgtcacatacgtagatgtaatacgaaacacaatgagagatgtgtataaactgagggtgtggaatctgaagtaagcccttgagtattctgggaggacttcattaagggagtgaatgatacttgagatgggtttcaaaggttggataggagtttgccaggccttgactaagaagacaagaacagcaagtgttttcttatttatgatgtaagatgctctcttagctcaatttcctcatcaataaaagggagaagagtgaatgaaatttaggaattgtgaaagaagggaaaattaataattgctagcctggtccaagctcaaggttgcttttatcatgaaagggctagactcttgtgcagtaaataattgtttacatgtggccctcccctcttccctcctaccctggactgtgagccctggggcaggaatggccgtgagccattttcatgatggaaatgaacaagccagtgattagtagtttattcactaaatcttaatttttttcagcaaatacttcttgagggcctactctgcgccaggtgttggggttagaaaggtgagcaggataaaacttgttctcacagttggcagtcaggtggagaaagtgacaaacacgcaatagtggggtgtgacaaatgcttatggaggggctaacatgagctgtggttgcacctgataaagccttagtgtctaccaggaaagggtttttggttttgttttttaagaggagttaaaatgtgtttaccttagtcactccagggtggggtggggagcaatgcagatattctagggagagagattaacgtggacaaaaatccaaaggtgcaagagaacttggagttttgtaggaagtgaaggaaattcatcatgactggtaacttacactgcaaggaaggaaacagagggaatgactagagggcagggagacaccttgctaccaccagcaaggaaggctgtaaagaccatgaccttgggcagaggtagtgcagtgggagtggagagaagtggacttgttcaagagagatttaaagagatagacttgacagatgttaatgatgaactgatgtgggaggtaagagacgttggagttaaagactcccacttttggggttggtgccattcatttacatcagagatcaaaggaggaggctgcagagagatggggaaggagggttcagtttaggacaggtggagtttaagaggagccgtcggctgggctcacgcctgtaatcccagcattttgggagaccaaggtgggtggatcacgaggtcaagagatcgagaccatcttggccaacatggtgaaaccctgtctctaaaattaatcaaaaattagctgggcgtggtggcgtgcacctgtagtcccagctattcgggaggctgaggcaggagaatcgcttgaaccgggaggcggagattgcagtgagccaagagcgccactgcactccagcctggcgacagtgagattctgtctcaaaaaaaaggagccgtcagggcagccgttcagaacgtgggctgcagttgagagctcttgtgcagaacgtgcaataggacttatcagctgtaagatgttactgaagccaagagggcgggtgacctgcctatgaaatgaatctgagtggtctcagctcggggcaactttgtccctcacaggacatttggagatgtctggagagatttttagttgttacaacttgagggtgagggtggagaatgctactggcatctagtaagcatatgctaacagtctaaatgcacaggacagccccacaacggaattagccagcccgaaatgtcagtagtgctgaagttgagaaatgctggtctagagaaaggatagacggatcctaggatgaggagtgaacagaaaactaggtaagacaaccaggaaggtggggggcatggaaatgaagggaaaagtgtgtttcccaagagtgtcgcatacttctgggaggtccaacaggattgaggctgagtatgcctactggatctagcactagggaagtcatgggtgaccctgctgaatagtgagggcagaagcaagttgcagggatggaggagtgggtagcaagagaaagggtgtaataataacagctaaggactgagcagttgctgccaggcactgtgctaaacattgtatgtacattattactttgaatcctcacattcttatgagatgcaaagatgaaggggctaaggaggctgaggagggttcatataaagcactttggagttagatcttcatttgaagctgtcagtcactagctgttgaccctgggtcagtcagctaacccctctatactgaggtttcctcatctggaaaatgggagacggacattaaaaagcacttactggcctttcaccaaataccagataatgttctaagcacttttacatgaatcaccttaattactctcctaacaacctaacaaagaggtatttttattcccattttgcaggtaaggaaattgaggcactgggatggaaaataatttccctaggttacttagctagctgtaaatggcagagctgggatttcaacccaggccattttaccttgaatgatgaacctacctactatgtgctagtcactgtgctgccactttatctggcacttatttcaattatcttttttttttctgagacacagtcttgctctgtcacccaggctggagtgcagtggcgcaatctctgctcactgcaacctccacttcccgcattcaagcaattcttgtgcctcagcctcccaagtagctgggattacaggcgtccaccaccatacctgactaatttttgtatttttagtagaggcagggtttcaccaccacgctggtctcgaactcctgacctcaggtgatctgcccaccttggcctcccaaagcgctgggattacaggcatgaaccactgcgcccggccaaattctcaaaaagcccaaggcccacccccaaccttattttacagacaaggaaaccaaggtccaaggtcacaagctaataaatgtcagagctggaattgaagtccacttctgtctgaccagagtctacactctacctcattactgacttccccttccccttagattgatcactgcgcttccttaagtgcttctacatctgccatctttctgttctcccaaaacatcctgtgaaagcaggcagaggaaggtcctgcacatatttttgacaagtcagtgcacctcagttttctatctgcacacatgcatctgcaggtttttacctgcttgctcctgactttcaggattgccatgaggaacaaatgagaactagatgtccaagcgctttgctaccataacgtgagaaatggtattagtagccccatttatcagatgatggaatggaggttcagtttttgaaacagcccgtctgcttatgggcatgccttacttaggtgtaagattctttgtaggggtcatctgtctgccttttcgtcttgctgtttctgtgttggctacgtataccagccagccttttgccttctgcgaggcctatggctcctagcaaccagctgctaccaccagcaaggaagggaaagagctgccaggagctttcccagttggtacataataaggaagcaatacagcatcctattaaaagcagatttttagaggggaagagatctaggtttgaattccactatgagctacagtatgttatcctccaacgtaaaatagagtaatactctccttagatattttcagctcatttaacccccacaaaaatagagggcttttctttttttaagttttatcttcattgtgttttctgatgataaaaataattcagttgccaattctaaaacaaaacaaaacaaaaaaaacttaatcatctgaagcaaattcagggttaagtttacatgagagaagaattgcatgtcggtggtttttgcagaacccacataattccccatcaagagaagatcatcattaacagtttgcaggggtgggtgggtctgtgagtatacatacgtctcaatacatattagaaaccccagttaagaaatggaggtacaggctgggcagggtggctcacacctataatcctagcactttgggaggccaaggcaggcagatcacttgaggtcaggaatttgagaccagcctggccaacatggtgaaaccctgtttctactgaagatacaaaaactagccaggagtggtgttggggacctgtaatcccagctactcgagaggctgaggtgggaggatcgcttgaacctgggaggtggaggttgcagtgagctgagatcatgccactgcactccagcctgggtgacagagcaagactgtctcaaaaaaaaaaaaaaaaacacacacacacacacacacagaaaattctggcagttcgctctctggtttaggtttcggtcagatgtcaacccttttaatccttagaacaaccctgtgaggtgctggtctacttcacccttggcaattcaaaacatgtcctgggccaggcatggtggctcctgcctataattccagcactttgggaggctgaggtaggaggatcgctggagcccaggagttgaagacaagcctgggtaacctagtgagactccatccctctctctctcttttttttttttaagtgcccagcatcacctgggagcttgttagaaatgcaaaatctcgggcatcaccccagggagacggagaccaaatccacattttcacaagatcctccaggttatttgtgtatacattacagtctgagaagcctgctatacacctgctgcacttgcttgtagagcagggaaggcactgaggccaagcttaggggtgtccacaacatgaccagggcagaatgagcttctccaacatgagctgtggcccccagcccgcccagcaaagttggtccctgcttcttctgctaccaccatacttcatgtctaaaagtgatcttctctcctccaggagctggtcgctgtcggctaagcaagattggagctactcgtcgtccacctccagctcgcgtaagggtggctgtgcgactgcggccatttgtggatggaacagcgggagcaagtgatcccccctgtgtgcggggcatggacagctgctctctagagattgctaactggaggaaccaccaggagactctcaaataccagtaaggttcaggccactcctcttccctcatgccatcacctccctctcctaggcctgcccacgttcccctgcctccccaggatccttgctccctccttagcaccgctttgttccctgagccttcactgttcacttaggaaatgttgacaggtgcccccatgatgggccctctctgggatactgtagggagagatgagaggttgaatcaaacatacattactgtgcacagagagggaggagcaatgagggtgagcaggtgagccccaagtagaggctgggggacatatcaggagggttggcggaacacagacctgccagccagcctacccaagctgcagctgggtagtgtcagagaagaccacccagatttggggacagaactcagaagggcagctactttataatcctactggggatttaaagttcaaactccttggcctgtttttctaggcgggggctggcaaaccatggcctgcaggtcaaatctgatcaggagtaagattttcagtaaataaaattttatcgtttatttacatattgtctatagctgctttctgactacagtggcagagttgagtagttgtaaaaggaacacatggcccacaaagcctaaaatatgtacaatctgcctttttacagaagtttgctagctcccatactaggccgttaacaatttgggcttcagtttctttccagcctcattccctcaatatatattaaactccctgctgtggcctaagctgcacttctccaccagaacgcagtggataggtgattggtatgtagagtctagttcagtcataagcagcatcctctattttccccattatggtgtaaaatacaatgttctacacatgtagccatttgaaaaagactgggaagccttgcttttttgctattcttgattctcagaatttctttctttggtcaaaatcttccttccttgagcagaatcagttactcctttgagagtgtgttcttatcttcgtttcctaaatcacagcaaagtgtggatatctatcctaccagactgaaaaactccaagagcagggatatcagatctatctctgtattcctaacaccaatagagagatgaggatggagtaggtgttaggtggatgctttttaaggtctttgtacaagaaaggggatagagacgttctcttaaatccaaggtccagatgagagtagaatcccttacccacccccaccccactccaccccttacacacacacacacacacacacacacacacacacgctaatttctttctttcttcctgcaggtttgatgccttctatggggagaggagtactcagcaggacatctatgcaggttcagtgcagcccatcctaaggcacttgctggaagggcagaatgccagtgtgcttgcctatggacccacaggagctggtgagggagccagaaaagaaacagctatgggtcagaaagggctggggaaacggagaggaaaacctcacagttttctccactctcttcccagggaagacgcacacaatgctgggcagcccagagcaacctggggtgatcccgcgggctctcatggacctcctgcagctcacaagggaggagggtgccgagggccggccatgggccctttctgtcaccatgtcttacctagagatctaccaggagaaggtgaggccccgtgctggttgggagaggagcaacaaagggtcaaagtaagacctggttctagaacatgaagctctgctgtagcagggaggtaaggtgagacctagaaagacagagactggggtagcagatggtacaactccgagaatagaacagagaaaggaaactgatccccaggaagaaacagcctctctatggagaattgcccttccccttcactgcttacacaggtattagacctcctggaccctgcttcgggagacctggtaatccgagaagactgccgggggaatatcctgattccgggtctctcccagaagcccatcagtagctttgctgattttgagcggcacttcctgccagccagtcgaaatcggactgtaggagccacccggctcaaccagcgctcctcccgcagtcatgctgtgctcctggtcaaggtgaggccgcagacaggggcgaggacctgggaagcccaggagcctgagctaagcacgagacctttgttcttacccccaggtggaccagcgggaacgtttggccccatttcgccagcgagagggaaaactctacctgattgacttggctgggtcagaggacaaccggcgcacaggcaacaagggccttcggctaaaagagagtggagccatcaacacctccctgtttgtcctgggcaaagtggtagatgcgctgaatcagggcctccctcgtgtaccttatcgggacagcaagctcactcgcctattgcaggtcaggcccacctgtctcagggaagaaggggctgcagaaggaggttctcaggcctgctgtggggtggggaatagcagttgaggcataggaaggctgggcttctgacccacccactgcctggtctcaccctcaggactctctgggtggctcagcccacagtatccttattgccaacattgcccctgagagacgcttctacctagacacagtctccgcactcaactttgctgccaggtccaaggaggtgatcaatcggccttttaccaatgagagcctgcagcctcatggtgagaactgggggaggcaggagtggaaacgctgggtctggaaattagggagtttgttgaaaccaccaagcatcagcacagaggctgaccacccccaatccctctctccaccccatcctccaatcatctagccttgggacctgttaagctgtctcagaaagaattgcttggtccaccagaggcaaagagagcccgaggccctgaggaagaggagatcgggagccctgagcccatggcagctccagcctctgcctcccagaaactcaggtgagcagtggggccttgggtgtatccccttcctgatgtatggcttagcagcagagctgcaatgcccgtcagatccttgagcagagagctgtgatcttgttcctctcccattaaattcaccctaggccggatgcggtggctcactcctgtaaccccagcactttgggagactgaggttgggtggatcacctgaggtcaggagttcgagaccagcctggccaacatggtgaaacctcatctctactaaaaaatacaaaaagtagccggatgtggtggcatgtgcctgtaatcccagctacttgggaggctgaggcaggagaatcccttgaacccaggaagcagaggttgcagtgagctgagattgtggccattgcactccagcctgggcgacacagcaagactccgtctcaaagtaaataagtgaattcaaccctggctaggcacggtggctcacgcctgtaatcccagcactttgggaggccaagacgggtggatcacctgaggtcaggagttcaagaccagcctggccaacatggtgaaaccccatctctactaaaaatacaaaaattagccaggcatggtagtgggcacctgtaatcccagctactcaggaggctgaggcaggaagaattgcttgaatctgggaggtgaaagttgcagtgagccaagatcatgccactgcactccagcctaggtgacagagcaagactgcatctcaataaataaataagtaaataaataaattccccccaaattctactccattgaatcactaaagtctaagattaatctctcctcagtgctgctgccttggggacctaaggaggcctcctcctggggatcctttccattttccaacccctttagccttcagcaaaacttctcactttgggacagctgtttcaaggatgagcatttttgcttctggttcaaggagtgatctggatcagatctttcagatccatgagagcaaagcaaaggagacttggaagagctgtcctgctgagaccatctggtctgtgtgtcagtgcccagcttctccatgactctccggggagccagctgctgtcctaactgcgtctaccctcaatccagataaagcctctaaactaagtcctttgtgtcacctcctgccccaactccaatcaccccacctcatggcccagtatgtactaatcctcaggtcatctctgttcaggggtcttgctttctgtgtctggccacttagcccttgcgctattccctccaccccccaggagccagttgcagttttaactttgccctgtttctacccctagcccaaataaagcctgtgaactactaaacagaggtgacctgaggtggccaagggttagtgcccactctgtcccagggggctactgtagttaaggaagatgccacacacaagaagatgcttgtgcactcatgaccccatctctcagtcttgtctttcccaaaccatctgtcagcactccccactgctgtgtgcacccagaaatgtgcacaggtaagctgtcagacaggcactctgagtaaggggaagctcagagttgggcacatcaaacccagcagacccagagcttgggggcctcacaggagagcaagtcagatgggaacatcagtatatgataccaggtggagaattcagaatcaggaaggagtagctgctgctgctgtgagagtcaggaaggaagagatgacttctagtgtttgcccacgtatgttctgatcctgtttttccaaggcactagcatggaaagcacaggagtgtccctgtcctccaggagccagttcacagcataggaagggagatgcattgttaagcttggcgtcatgggaaaggtggcatcaaactgacctggaaagattattgatacagatgtgaggaggtgtggggcaagattccaggcaaaataaatgaatgttagacgttgctgactgggcgcagtggctcacacctgtaatcccagcactttgggaggccaaggtgggtggatcacttgagcccaggagttcaagaccagcctgggcaacatagtaagaccccatctctacaaaaaataaaaaaattagctgggcatggtggcatgcacctgtggacccagctactcaggaggctgagacagggggattgcttaagcctcaggaggccaaggctatagtgagctgtgatctcaacactgcactccagcctgggtgacagagcaagaccctgtctcaaaaaaaaaaaaaaaaaaaaaaaaagaatgttaagccttaccgtgctcagagtcagtcaggactgcttgaacaggccttcccagctgcccacagcagggaagcttggcagctgaggtcttcggtggatttcaaagccctgctaaagatggcatcctctgtgatgttttccgcaactgctcctccaaatggataggcactgtcctggctgtcaccttattatggtctcttgatttcctcagtagacagtgcctccagggcagggcagtgtcttaggtctctcatacctggcactcaagtgttcgcctgatttcctggcatccccgagcagtcacttcacctgatgaagacactgcacccagagaaactggatgcctagcaagttaacattaggttctggagctacaggatataccaagttaaggtgtggtgaggggagtcctgctgctgtaggtggtgatgagggaggaggtaggtggggagcaacttctttttctgctcagccccctacagaagctaagcagcatggacccggccatgctggagcgcctcctcagcttggaccgtctgcttgcctcccaggggagccagggggcccctctgttgagtaccccaaagcgagagcggatggtgctaatgaagacagtggaagagaaggacctagagattgaggtacgtgttttagggatgtgggagctggattcctattggccttgagaagcaatccttggatcttcagacagggaaggacactcaggctggactagagtccagttttctcccaataccggaagttctccagcttctgcttgaatgtccttaacatggctgaactttgacagacaattgagaccagatgtgagggtgagaagaaaaagttcaaagtaaaagcaacaaatgttaaacattacatttcctaaagcccagctcaattaattgaggactgtgcttgaaaagcctttcccttcaatatttgcagaggcttgttccacctctgggtagccccctaatcacagaaagcccttaattatgttaggctccacctgtctcctggtaacctcccactggtcctagccctgccctctgggggctcagagccttgcatactcaccctggtaacccactcccttcaggctgccctggagttgggtctggatcacatctccctgatcctttccaacagaggcttaagacgaagcaaaaagaactggaggccaagatgttggcccagaaggctgaggaaaaggagaaccattgtcccacaatgctccggcccctttcacatcgcacagtcacaggggcaaagcccctgaaaaaggctgtggtgatgcccctacagctaagtaagtttgactccaggggctggggggccaaggcagctgagatcctataagggaggaagtgttaggagcagctgtctccatgtcattcatattctcccaccacataccagtcccagggaggggtgaggaggctctgaggcagtgctgggggtgctctgccctcgggtgtttaggacagtgggatggacaaacgagtagaggattgaagataatgcaagactgactgaaattcctttaaatgcgggtataaaaaaggtcatgtggaaacacaacaggttaactctggatggaggggagctggggaatcagaaatggaagaatcgaagggctaccagggagggtgaaaagtaccctttgccctgactccaattctcgattcctactttcagttcaggagcaggcagcatccccaaatgccgagatccacatcctgaagaataaaggccggaagagaaaggtgaaagtagctgggggcttaggctacacctggagcccagaagtaagggggagtaggctctagggggaggagcgttggccttggggttaaacgaactggatgatggccgccagctactaacagacctcaacttgcttacccctggaatgtggtgatggatggttccttgcagggcatttagggtggaaggcagtgatgtggatgtacctcgcagagcggatgttccactgtgtagcctggcttctaccctctacaagcttaagagggaaaacttagggaactatgacctaagcagtcaagcaagaaaccacacatatgcacatacccagaatcgaacaccactagaactacccaaaaactgagatggttgggggaggtatcatttattcatattactttctcccatgtactttttgaaagacagcttattctttcccttttagagatgagggaccagatttaagagcttattttgtgctttacattcattaactcacttgatctccacagcaactccatgagaagggtgctaatattaccactgggtactgagtagtacctctctttcactagttgcataataagaattaacccagagagtgacctgagggcgggattttggacacacttgacaagagaggaagaggctggagcgcaggaggtagctggtgctgggctcctagtcttggcagaggagcccaaagcacttggctgccctgcgtgtcactcatctccctttgcctcccagctggagtccctggatgccctagagcctgaggagaaggctgaggactgctgggagctacagatcagcccggagctactggctcatgggcgccaaaaaatactggatctgctgaacgaaggctcagcccgagatctccgcagtcttcagcgcattggcccgaagaaggcccagctaatcgtgggctggcgggagctccacggccccttcagccaggtagcagcccactggactgggggagggcgggggcgggggagaccgggtacccccgagaccctgtcccctatcgatcctgtcccgccaggtggaggacctggaacgcgtggagggcataacggggaaacagatggagtccttcctgaaggtgaagtcacggccctgcccctcctctgcctgtcctgcgccccgcgcccctctctaacgtcgctgtctccctccctcctgtgttgcaggcaaacatcctgggtctcgccgccggccagcgctgtggcgcctcctgaccgtcgtctcctcactccgccttttcaaatttttgtataaccccgtgttgtgtaaatacagtttttgctccggtgcttccgcctgatttttggggctgcgggggcgggaccggggtgtgaccgcctcggggtgggccgcgagcaaggcaggcgactccactgggcgccatcttcggggaacgactcagcgcaggattgtaaatacaccgctggggtggggcggggaggacggtggcctgcaggacgcaaaaagcggaagccgaagcatgaggcctgcgaccgttaggcgggcgcgcgctcagggattagccccgccccgtccgtgcccccggcgcgcgcgctcccccattctcccgctcggcaacgacggcggccttgtgcgcgtgcgcgcgaaataacggccgctggcggagggagggggagtggaatcgttggcggggggaagaggagagaagccgccctgtctcccgcgcgcccaccacctgcgccatcgtcagccaatcagcagccgtctcaggggtctcgcgctcggggcgactcgggctgctgggtggctcccccgtccctcctcccgccagagtccctctcgcgcctgcccctcccgctggccacgcgcgcgctcgcgctagcgctcgcgcccgctccagcctcttgtgtgtcctcgcgccccccgcccgccctccccgcgcgtagtgtgctccgcttcccccaccctccacctcccccctcctgcccgccccgcgcgcctcctcccgggttccccctcccccaccgccgccgcctcctcctcccgccccagggtgagcgcgagccacctccctccctccctccgccatggatcccagcaactggagcagcttcatcttccaggtaacaactccctccccccgcccccacccccctgcccacaccccctcctgcccgccctccctcccgtcccaccccccctccgcgcgcccggtgcgcgcgcagctgtccccctccctccctcgcgccctcccccgccctccccgaggcgccggctgggcgcgcgcgcggcgggggccgaggctgctccctcgctccccccaccccgccccgccaggctccaaccgccgccgccgccgccgccgccgcccgggcccccgcccccggccccggccccgcggggcctcccgcccccacccagggggcgtcgccgccgccgtcgccgcggcgctccgcggcccgcaaggcgccctcttttcctccctcccgccggccggggtgcgcgggcggcggggcggcccgcgggccatgcgttcggcgcggcccagcccggccggccgggggcggcgccccgagcccgggccccgcgcggcccgcgcccccggcccccgctgagccccgggggccccgctgcggccgaggccatgttcccggtgtttccttgcacgctgctggccccccccttccccgtgctgggcctggactcccggggggtgggcggcctcatgaactccttcccgccacctcagggtcacgcccagaaccccctgcaggtcggggctgagctccagtcccgcttctttgcctcccagggctgcgcccagagtccattccaggtgagtagggccggccgcggcggcccgggctggggggggacgcccgcccgcacccgcggcccactcggcgccttgtctccgcaggccgcgccggcgcccccgcccacgccccaggccccggcggccgagcccctccaggtggacttgctcccggtgctcgccgccgcccaggagtccgccgcggctgctgcggccgctgccgccgctgctgccgccgtcgctgccgcgcccccggcccctgccgccgcctctacggtggacacagcggccctgaagcagcctccggcgccccctccgccacccccgccagtgtcggcgcccgcggccgaggccgcgccccccgcctccgccgccactatcgccgcggcggcggccaccgccgtcgtagccccaacctcgacggtcgccgtggccccggtcgcgtctgccttggagaagaagacaaagagcaaggggccctacatctgcgctctgtgcgccaaggagttcaagaacggctacaatctccggaggcacgaagccatccacacgggagccaaggccggccgggtcccctcgggtgctatgaagatgccgaccatggtgcccctgagcctcctgagcgtgccccagctgagcggagccggcgggggagggggagaggcgggtgccggcggcggcgctgccgcagtggccgccggtggcgtggtgaccacgaccgcctcggggaagcgcatccggaagaaccatgcctgcgagatgtgtggcaaggccttccgcgacgtctaccacctgaaccgacacaagctgtcgcactcggacgagaagccctaccagtgcccggtgtgccagcagcgcttcaagcgcaaggaccgcatgagctaccacgtgcgctcacatgacggcgctgtgcacaagccctacaactgctcccactgtggcaagagcttctcccggtgtgcacggggcctcggccgcccgctaggccgtggggagggagggacgcgacggaggtggcctggccgtggctggcggggagggaggcggctgctgaggctggggaaggggagccactcccagggcggagggaggaagcctctcccggttaccagggagcaaggggtggtcctttgtcgaggaggtgggccttggggttgacggaagcttcgcgtgggaggaggcggcggcggcggcagcggctgctgggctccaggggagggatttcctgcttaagtgtcgctgtgacggcctgggctccgggaggaggcgcagggatcctcggaaaggcctgtggtgcggtttggtggatttggggcgcaccacctccgccctaaccccaaccccaacgtgtccccaggccggatcacctcaacagtcacgtcagacaagtgcactcaacagaacggcccttcaaatgtgaggtaggaagcccgcctcctcctgtcttggttttcatgattttgatcctcatggtagctgtctgagtcagtctctcagaccccctttttctctctcttctttttgcctttttgctccattttctcatcccttcttcaaggcctcatcatgtcactcccatttcctacagatcaaagatccccaaggctctgattcctttaatctcttgctcccccctccccagcccaccaagctttaactctcctgtgacaccccccacgcccctcccccctcctcagaaatgtgaggcagctttcgccacgaaggatcggctgcgggcgcacacagtacgacacgaggagaaagtgccatgtcacgtgtgtggcaagatgctgagctcggcttatatttcggaccacatgaaggtgcacagccagggtcctcaccatgtctgtgagctctgcaacaaaggtacatgccgagggctgccgggagggccaggggcagagggtgggcgcctggccagacgccttgccacggatacgggttaagggtgctgtagccaagagctcgtggcgtctagattcctacaagaggtcaagggagcagcggggggacacctgaatgaacatcattagactctaagaagtcctggttggaagagatgatctgccagagaggttgaacctcctggtaatgtgtggggaaagcgggagtggaacttggctgctctggggaaggagtagtcaagaaagccagttccaggggtcacaaggcaaggtttccgctgcgcagccacaaggtcttgtctccagctcctggggcaggtggagtacacgggccgggctttaccagcacgcaccctgcacgggtagcagagaaagctgccttcagtcagactcaccggttaactgggttgagaccgcggggcactggagggaaggggacacagccgtctctgctgagggtcaaccctgcaagtggctaggagtcagtgtctcgtcatcctgggagaggtctcccggccatggagaatgagttctgtaggtaccaaggctgagaagcgggcaccacacaagccaggccccaggctcagggaggggctgtgtctaccagccccaacagagcagttggccccaggctaccaaggataccgtgggaggaggacagggccatctgaggagggcatcccccgcctaggagatcagccccgtctctggggtctccgcctggctgacccccgccccatcccaatccaccccccaataggcttcaccacggcagcatacctgcgcatccacgcggtgaaggaccacgggctccaggccccgcgggctgaccgcatcctgtgcaagctgtgcagcgtgcactgcaagacccctgcccagctggccggccacatgcagacccatctggggggggccgccccccctgtcccgggagacgccccccagccacagcccacctgctgagggggacccccgcacccaccaggcaaggcgtggggcatggctggggggcgggatggggggtgtgggggacaacggggctcaaagggcccaataggggatctcaggaaggcgagggatgcccatgtaccactcaggctagggagacttctgggcacagggaggatccttgagaactgctctgtctgggtgaggatgcaggctgaggcctctggggtccagataggaagtgagcaacggctgtgtcccaggggaagcaggctgggaaggtgtggggtgagggcaaggctcttgccattcagatcgcgctgtgatccgtggtgtttctcctgtgcaggtactggtgaggtttgtccaatggcggcggcagcggcagcggcggcagcggcagcagcggcagcagtagcagcccctcccacagctgtgggctccctctcgggggcggagggggtgcctgtgagctctcagccacttccctcccaaccctggtgagctccaagttggttgcgggggagaggggagaatggagtagagtcccttggtacaagctcctctcccccctcttttcccaccaactcctatttccctaccaaccaaggagcctccagaaggaaaggaggaagaaatgttttcttaggggaattcgctaggttttaacgatttgtttctcctgctcctcttctgtcagacctgaccccacacaaacctgtcccctcggttgtgttgaagtcccctggacagtgggcaggggtggcagaggacacgagcagccactgcccgtaccccctctcctctctgtaagcccatgccctgtcttcccagggacttgtgagcctcttccctcgacggtcctcttctctccttccagtcctctccccctgctgtctgcagcccctccccggggagttggtgctttcttttccttttttttttttttccagggggagggaggagaggaaggagggggatcagagctgtcccaaagagggaaagcggtgaggtttgaggaggggcagaagcagggccggcaaaggttgtaccttcataaggtggtatggggggttggggtcaggccctgaacatcgtcctacttgagaatctgtcaggggaaaaagtcaaggggagcaggaggaagagccaggagggccagaggcagagaagagatggagtcttaggggccagggtgagcgaggggtccagggcctagaggtgcttcctgggggcgggggaatgcagccagtgtccccctcccctcttccaccccagctccagccctggtcttgtcttttcatccctcttccccacgacagaagaagttgtggccctggccatgtcatcgtgttcctgtgtcccctgcatgtaccccaccctccaccccttccttttgcgcggaccccattacaataaattttaaataaaatcctgtttctggctctggattgaatgaattgccctcactaagaactgccgccaaccccaagggtttcttctcggcctggtgtccgtcaatccagccttgctctgccctgtgaggctgtgaggttctggctccgccctccccaggggcagccttactggcggcagcacagatacagggcggggccaaggctgtggctgtggagagcaagttccaggtctctggggaattcccaactcggacaggcccagaatagcccctggaggtttgaagaggccccgtcagaaacccaaacagagctgccagacgggaatgccgccctcccccgtccacactcatggccgctgctcagcccccagccgcatccctccccacgcgcgtcacggccctgaggccatggtgggtggatgcggctgcggaaaggctggggagtccgagccctaggactgggagcagcgaggtagagaatgaaagctgcacctgtccctcatcctgggcatgggccactctgtgtttacacgggctcctctgcccagctcctcctgccccttggaattccctttcctgtccccgctccgtcctttccagggccccttttttgagccttccagcgccagtttctgccgctcctttctgcaggctccattctctccaaaccccaccctgctcctcctctgcagcctccccgcgtcttgccccatcttccttgccctcctgctcgtagagacgcctccacccggtcctgcctgtctcactggtcccgtctcctcgcagaaccctctccgtttcccccaaatccccgtctcttccaggaatcccggtgaccgttggcgggaggggccggggacttaagaaggaggcgtctctcctggaggcgcgcgtgagaaggggcagggagggggcgcgagtggtccccgggccggttgcctgggtaacgcgtggctcccttgggctggcgggaggggccggaggctcgcgaggggcgggggcggcgacggcggcggagcgtaggggaggggaccggagaggaggggatgagcacacgggagaggagaagagggagacccgccgcctccctccctccctagctgacttgctccctcccgggctgcggctgctgcaaaagccagcagcggcagcgggagctgtccggaggccggcgtcgaggtgagacccgggcagactgaggctgcgggtaggagtggaccgaccgacggctgacgccgggcggactgcacgggaatgcgggtgtctggagggctggtggtggtgctgggcgggctgaaccatcgggaggaggcgccagcccaccgaaggcgagggaagccccgggagaggggctgacaggggatcgaaggagataaccaggtcccccagaaaggggcgggagcgtcctcgccctaaacgcgcagcaagaaaacccgcaccgcctgggagcccagggaggaggggaggatgcagagggagtggaatgcgaatgtcgggtcctctgcccagtcggcctgtcggagtgctatttgcacagctcgttgattttggggtgctgggatctgagagtctggatcttgttggatggacccagggagagaccctggagaaggtcctgtttacaaaagggttaatcttccccagggctctccaagcagaagactttgagtagagcactcctcccgcagggatgtcccaccctaaggcaaaggaaaccccaacttttcttcctctccctagaggcagtgcaaggctggccctgagacaggaatgtggcccaattgggcctgcagtgctgagcgccctcttccctcctcaccccaagcctatctcctcctcttccagggtttgccgctgtctctgctattccatcctccccataggggctctctcccctctcccatctcaagatggcagccagcagctctgagatctctgagatgaagggggttgaggagagtcccaaggttccaggcgaagggcctggccattctgaagctgaaactggccctccccaggtcctagcaggggtaccagaccagccagaggccccgcagccaggtccaaacaccactgcggcccctgtggactcagggcccaaggctgggctggctccagaaaccacagagaccccggctggggcctcagaaacagcccaggccacagacctcagcttaagcccaggaggggaatcaaaggccaactgcagccccgaagacccatgccaagaaacagtgtccaaaccagaagtgagcaaagaggccactgcagaccaggggtccaggctggagtctgcagccccacctgaaccagccccagagcctgctccccaaccagacccccggccagattcccagcctacccccaagccagcccttcaaccagagctccctacccaggaggaccccacccctgagattctgtctgagagtgtaggggaaaagcaagagaatggggcagtggtgcccctgcaggctggtgatggggaagagggcccagcccctgagcctcactcaccaccctcaaaaaaatcccccccagccaatggggcccccccccgagtgctgcagcagctggttgaggaggatcgaatgagaagggcacacagtgggcatccaggatctccccgaggtagcctgagccgccaccccagctcccagttggcaggtcctggggtggaggggggtgaaggcacccagaaacctcgggactacatcatccttgccatcctgtcctgcttctgccccatgtggcctgtcaacatcgtggccttcgcttatgctgtcatggtgagccccatgggaccctagcccaggcctgctgtggctcccagcttcccgccagcgctgcaatagagcctctggagtaatcatgccttccttcccctctcctctctgcatggatcccacctccccaattccagggcctttgtttgcctctccctaggacctaaccctctgagccaccactgccctgcccctttgggtgggagggatatggaaacacgtgtcacacagcctcgctgacctgtgccctcctccccctgccccttcactcctccttcctcccttacccgccatctatggggctggcctctctctcttctggatgacttttccacctgatcccttctgggctggcttctcctgaccccggctatgtgcctccacccctcgccctaaccccagtcccggaacagcctgcagcagggggacgtggacggggcccagcgtctgggccgggtagccaagctcttaagcatcgtggcgctggtggggggagtcctcatcatcatcgcctcctgcgtcatcaacttaggcggtgagtgggggcttgggacaggcaggggaggaatggaagggttggcaagggcagctttactaacccctgcccctgctctctcctgtctgtcctccttacctctcctttgtctctccttgtctccccctccccccgtctgtccttccctctcctctcccacagtgtataagtgaggggctctgccccgcatcccaagacttttcttcctgttgggagctgccttgggcccatccctcccctggggggagcccaactgatggccctggcccccacccctaaggaccaagggagcctgagcggccttgtttacagcttctgtcctgctcctgcatcttgccaggctcctctgccaactgtaggcctgcctcatccctgcactggttccaacctccctgcactaatgcctgcatcccctccggcctcttggccccctatccctgcacttctggaaacctccctgcactctggaaacctccctgaacacctccccaactctgcgctctcagcctccctgcatctctcctggcctccctgcacttcttccagccccccaaattctctggacctccaccctggccgcctcctcccaactttcattgtcttggcatctctcaaccctcagtcctctcttccttcccttctttatcatctcccctttcctctccacgtcccgcccccttcctcttcctgcctcctcatctcccttaagcatcctcttctccaacctcccgtcaccgtttactctgcaaaattgacagcacttagacgaggcttgggggcagggagcagtgttgggagagggctccccaaccccaggctcggactgttctctgctgggaccacccagggtcggacacccaagggtgcctggcaggtcgcagagttggcaagccgggcctcgtatggggactcgggtgagggtggcgagtactggttccgaacgcacgcaggggagaagggagggacgcggcgctgacccttccaggtcagctggagttgacccgcccacctgggcttttcaaccccagtccgcgagtttctttcttgaaggtgtgggggctagattcattcacgtgcttcgtaatgaaataatccaaaaaataggaccaaagcgcccactggcaggagcgagggcggggcgccgcgctctataattattttctaagatgatgggggaggtttgttgcacgcgacagcccgctgaggaggcggggaccgagctacaacgcggttcggatttggcgggggtttttttccttaaaaaaaaaaaaaaaaaaaaaaaaaaagtctgggggaagaaaaaaactaaaattcttaaaaaaaaaaaaaaaaggctattatcaaactgatttctccctttttgtatgccggatgctgcatgagtctgaaacaccaataaacggagactgcatgagactcgcctccaatctcggttggttcctgcgttcgtcccgccggcccggcggtgctgcctttctggcagaaccttactgggtggtatacgcatgcgacttcccggtggccatctttactgtgggctgaagcctgtgcgcttactcgcgcatgtgcaagccttccctcgctttcctcttccaagtagccttgcctagagcggagcctcccgcgccatttctgtgcgcctgcgtagcgtgaccctgcgcagcctgggaggcgggtcttagctccaggtgcgtacggcatctgacttgacgtggcccacaactgaaaggtctggggagaaggcgccgtgtccgggtgtggagaggggcgtcgtggaagcgagaagagtggcccgtccctctcctccccctttccctctttcggaaagtggtttctgcggggcccgggagcctcggagtaccgaacctcgatctccggggcggggtccttggtggggactgagcgccccctcccggggacgggcggtctggccgcggagtcccctgcgggagcgtgattggctggaaacggtcccgaacccccaggggagcccgatccctgggggaccctggcttcggactccagtatctgtcgtcgcagggtccctgccctagtggcctatgtcccttgctcggggccatggagacactgcggccagtacggcggcgcctctgtctgaagaaggggaagtgacctccggcctccaggctctggccgtggaggataccggaggcccctctgcctcggccggtaaggccgaggacgagggggaaggaggccgagaggagaccgagcgtgaggggtccgggggcgaggaggcgcagggagaagtccccagcgctgggggagaagagcctgccgaggaggactccgaggactggtgcgtgccctgcagcgacgaggaggtggagctgcctgcggatgggcagccctggatgcccccgccctccgaaatccagcggctctatgaactgctggctgcccacggtactctggagctgcaagccgagatcctgccccgccggcctcccacgccggaggcccagagcgaagaggagagatccgatgaggagccggaggccaaagaagaggaagaggaaaagtaaaggcacacccttacaccttgtcccggggctgctcccctgatggcgggaggaaatagggaggggaaaatgtgggacgctggaacctttgaaagtggagggagggaagccagcgggggaggaggaacgggcaggggagaagcacacgtgtgggtgggagggaggaccgccctcacccttaactatgttcacctgtcccagaccacacatgcccacggaatttgattttgatgatgagccagtgacaccaaaggactccctgattgaccggagacgcaccccaggtacaaacgaagaggaaacagttgggggaggtgaagggcctcggctcagttacccaagatcggctcccctagaggcctttgcttgctgcctcagctcccacacaacttacagctgcaggagagagtattcacccagtagcaccatctttatgacttagattactaccttgtcttccttttttttttttttttttttttgagatggagtcttgcccttgtcccccaggctggagtgcaatggcacgatctcaactcactgcaacctccgcctcctgggttcaagcaattctcctgcctcagcctcccaagtagctgggattacagacgcatgccaccactctgggccaatttttgtatttttagtagagacaggctttcaccatgttggccaggctggtcttgaattcctgaccttgtgatccgcccacctcagcctcccaaagtgctaggattgcaggcatgagccaatgcgcctggccccttgtcttcctttaagagacaattataatacaaaaaattagccgggcatagtggcgggcacctgtagtcccagctactcaggaggctgaggcaggagaatcgcttgagcctgggaggtggaggttgcagtgacctgagatcacaccactgcactccagcctgggcgagagagtgagactccgtctcaaaaaacacaattacagataattctttttttaaaaaaacaactagtcattgattctggaaaattacagataattctatcatgtttcccattcccagaagtccaagtcctggcctttcaatattatctagatctgcatccctctactaccatgtacattctttaatcacaccgctggccccatttcccaccccacatgccttcctagaatttaccctcagagtcatgcctttccttttttcttttttttgaggggtggagagacagagtcttgctgtgttgcccagactggttggtctcgaactcttgagctcaagtgatccatccgcctcggttctcaaagtgctgagattacaggcatgagtcactgcacccagcctagagccattcttgatttctctctcttttacctgaacattcacaccagcagcaagtcttggtagctataagatgtacatttccaagtacctctgctagtctccactttcaataccacatccccatccaagccactgtctttcttgcctggatagttgtagtagctcctaactgggctctctgcttccagcttctgcaattcagatgaaccttttaaaacataaatcatatcactttttttttctttgagacgaagtctttctcttgctcaggctggagtgcagtggcatgatcttggctcactgcaatctccacctcctgggttgaagcgattctcctacctcagtctcctgagtagctgggattacaaggacacgtcaccacgcctagctaatttttgtattttctagtagagagggggtttcgccatgttggcgaggctggtcttgaactcctgacctaaagcttcccaaagtgcctgcctcagcttcccaaagtgctggaattacaggcgtgagctgctgcactcagccataaatcgtgtcacttttccacttaaaattttccaagggattccatcttgccagggaagagcatgtcaaaggagaatccaagcgcttttcccgccacctccagttctctgcactcttttttttgtttttgtttttggcgagtaggggagacggagtgtagctgtgtcaccgaggctggagtgcagtagtgcgatcttggctcattgcaacctccacctcccgggttcaagcgattcttctgcctcagcctcccaagtagctgggattacaggcgcccaccaccacgcccagctaattttttgtgttggccaggctggtctcaaactcctgacctcgtgagttgcccacctcagcctcccaaagtgctggcattacaagcgtgaaccaccatgcccggcctgcactcttctttgaacagaactctgttcttgtcctggggcctctacccttgccattcccctgcccagtatgttcctccctgttcttcacattacctgtgccttcctgtcaatcaagatctttgcttctcaccctctctgaggtccaaccctgaacctcaggtcctccaagacagaggcctggggacctgcatgtttaaccagctccccaagtgatgagtgaggtccaggcaggtatggtgtacaccacctccatcccttccatgtatcttaccttcctcttctccaggaagctcagcccggagccagaaacgggaggcccgcctggacaaggtgctgtcggacatgaagagacacaagaagctggaggagcagatccttcgtaccgggagggacctcttcagcctggactcggaggaccccagccccgccagccccccactccgatcctccgggagtagtctcttccctcggcagcggaaatactgattcccactgctcctgcctctagggtgcagtgtccgtacctgctggagcctgggccctccttccccagcccagacattgagaaacttgggaagaagagagaaacctcaagctcccaaacagcacgttgcgggaaagaggaagagagagtgtgagtgtgtgtgtgtgttttttctattgaacacctgtagagtgtgtgtgtgtgttttctattgaacacctatagagagagtgtgtgtgttttctattgaacatctatatagagagagtgtgtgagtgtgtgttttctattgaacacctattcagagacctggactgaattttctgagtctgaaataaaagatgcagagctatcatctcttaaaaggaggggctgtagctgtagctcaacagttaggccccacttgaagggagaggcagaattgtactcacccagattggaaaatgaaagccagatgggtagaggtgccctcagttagcacctgtcccatctcgggccctccaactcctcccagtcccactccagtgcagccagctggctccaaggtagaaacccatgagcactcagggagcagtgtgccttcagctgcagcagaagcagcccggaggataaaatgagaaccagctgcacacgggccctttaactcccaagccccacccctgggcttggcctgccttgccctgccgggaagtgatccccaaggcagggtgagagttccccatctgaggcgtttgttgcagctacctgcacttctagatgtgagtacattgtactagccccccaaaccccaaatcaggggcagatctttgtatcccttgaggctctctttagtcctgtcttgctttgaagggccttgcttctgctggggcagggaaaacatgtctgaatcagagtggggaaggaggatgggtggtggctttgcttttggaggtttcactttccaatagttgggagtcttctgggttttgaagtaaaggcagattaacaccaacaccggtcccccacccccctgcaactctcaggcctctctctgacttcagggtcccacctgggaaatcaggtggggaaccttacagggtcattcagaccccatcttagccctagatcggtgcttgctctactcacctgcactgtcctggggacctgggctctggcctgtcaccttgagctccaagaatgtgacctgtacccattcaggccccttaactctgacagatgagggtttcttactcctccatgcagggctgggccagctgttggtctcagtcgatcattcaggaagtcattagcagagtgatttccagaaggcgtagaatttagtgaccaaggttctttcctttttgggaggagaaagtgaaaactaggatgctcagctggacccaccagcctgagattctggggattttagagctgtcccttggggagccaagcacttgggggtggaggtgatagcgaggctgatggcccctgtgttctcagctctctgcctgggtagcccctgggtgatgggggagaggccagctgtcacgtggggtatcaggtggctctgccagaaactcccttggcacacagagcactgggtcggccctcgggtgtggctgtttgggcaggacagccctctgtatgtagccttgagcaggtaggggggccaccttgagtgggtggcccagagacagcctcagggctccaaggtaacggggtgctcaggttatcttgggtgctgccctcccaggttctgggggagcagaggctgggcgctggcccaacttacaggaaacactcacctttgaactgccattagcaccatctgggcagtacacagccccacccaggtcctctagttcttgttctcggcttagaatctttgtgtttctgcctgagaagccactgcctcctagtttgtggtctctacagttatagccaggttggacttccggctccgtcctttgataactgtgtgctcttgggcaaatttcttaacttgcaggttcttgtgaggataacatgagttaattgagggcacttaacactacctggcacagattaagctcatctgaagtgggagctgttacttaggggcgtttgcctagaacacagggtccagaggctctctcccggaaacttagacccagtgagtcagaagtgaggcctgcaaaaagcagcaggagtggggttaagaattccagcctagggctggatgcggtggctcaggcctgtaatcccagtactttgggaggcccgaatgggaggatggcttgaggccaggagttccagaccagcctgagcaacatagcgagaccctgtctctgtttgtgtgtgtgtggttggggttttgttttttttttttttttaaagaattatagctcagtcctatgattaggcaagttgagaaaatattgatgaagatcaggggtgctgaagcctggttcctggggtcgcttctgatctaggcggttcttgcctctggtgactggtgttaattggcaggagtgggaggagggaggacaagtggaagtctaggctggctgagctgttctgtctcgaaaagttcctaaaactgtgctgctttaaaaaaaaaaaaagtaatttatgagacacattctcaatttccattaatcatctcctaaagggggtaaaccaggaagccgctgggtgaaaacaggctgttggcaattcctgagtcatgtgacccattctctaaagactagaatatttaacttaaatcagtgagaaactctgtgaagttgtgtccttgtttataccaaacttcatgtgccttttcctgaacctgaagctgtgggaaggtctgggggcagggccgcatcaccgaccttacgtccaacctcaggactgcctggagcaagagccctggggttggggacaaaggaggctgcctggacctgggtaagggaaggggctggaggagaatgagtgcaattccctgcccttcacagcctgcaatcggagctgtgtttttgtttttgagacagagtctcgctctgtcccccaggccagagtacaatggcgcaatctcgactcactgcaacctctgcatccctggttcaagcaattctcctgcctcagcctcccgagtagctgagactacagttgcctgccaccatgtacggctaatttttgtatttttagtagagacgaagtttcaccatgttggccaggctggtctcgaactcctgagctcaggcaatccgcctgccttggcctcccaaagtgctgggattacagccactgcgcccggcctgaaactgatctttatcctcctcccagttcctactgtgcaccagagaccctccagtctctaatacctttgacttgaagagcagtcatttttttttccttttcttttcttttcttttttttttttttttttttgagatggcctcactcttgcccaggctagagcgcactcgtgtgctccatttacggctcactgcagccttgacctcccaggcacaggcgatcctcccacctcagcctccaaagtagcagggaccacaggtgtgcaccaccacacctagctaatattttttatggtttttatagagacagggtctccctatgttgcccaggctggtcttgaactcctggcctcaagtgatcctcccatcttggtctcccaaagtgctgggattacaggtgggagccaccaagcctagtcaacagtcacttttattctcacttcactggagaggaaggctcagaggctagtaagtggcccaggagcatgctggcagtgataaaacctgctggagtgacattttcccactggctctcaatcctggatatatattaagagtcagaggccaggcgcggtggctcacgcctgtaatcccagcactttgggaggccaaggcaggcggatcacgaggttaggagatcaagaccatcctggctaacacagtgaaaccccatctctactaaaaatacaaaaaaaattagctaggcgtggtggtgggtgcctgtaatcccagctgaggcaggagaatggcatgaacccgggaggcggagctgcagtgatccgagatcgtgccactgcactccagcctgggtgacagagcgagactcgtctcagaaaaaaaaaaaaaaaatgagggagaactttttacaatagcaacgggtgaacctcacccagaccaattaaatagaatcaccggagatgggtggctttaaaaaaaggtctccagaaggcctggcgcggcagatcacacctgttatcctagccctttgggaggccgaggtgggtggatcacttccagcctgaccaacatggcgaaaccctgtccactaaaaacaaaattatctgggtgtggtggcggacatctgtaatcccagctacttgggaggctgaagcaggagaattgcttgaactcgggaggcagaggttgcagtgagccgagatggctacactccagtctgggcaacaagcacgaaactccatctcaaaaaaaaaaaaaaaaaaaaaaaaaaaaaacagatttccagatgaccagtgtgcagcccgagccgagagtctgctttagaccagagctgctcagactgtaatgtgcatgcaagtcattgagggtcgagttaaaatgccagtagattcagtggctctggggtggggccccaggctgtgttgctatcaagcctccaggtggtaccactctactcactgcagaccccgtaggcagtgtggtcacttggtcaattgccatttaagactcactaggggccaggtgtggtggttcacgcctgtaatcctagcactttgggaggctgaggcaggcagattgcctgagctcaggagtttgagaccaccctggggtgaaaccccatctctactaaaatacaaaaaattagccaggcttggtggcatgtgcctgtaattccagctactcgggaggctgaggcacgagaattgcttgaacctgggaggtaggtggacgttgcagtgagccgagattgtgccacttcactccagcctgggctacagtctccaaaaaaaacaaaaaagagattcagtatatcagctactcacagttgaccctgaagatctctgggaagtagtgactcatgactcgtttatttattaagttttgctgtagcagaagtttacttttgagccaagagtctgatccggtctccctcttttttttttttttctttctttaaagagatggggccttgctatgttgcccaagctggtcttgaactcctggcctcaatccatcctcccaccttcggcctcccaaagtgttgggattacaggtgtgagccacctctctcaggcaagagcccctcttttaactagacaatgaacctggtttctgctttggacaggctatttagttcctgcttatttaccctcatggtgggagagaccctggtgggatttggggtgaaagctggctgtggttcttgcaggagcctcatgacacctgagggaggtgtgatcaggcaagactgggcctctacactgagagccgactagggcaggtctcagaagcagagactgaaggaagttgggtggatgagtggatctggggagcaggggccaagcctgagggctgggcagagccttccaaaggtcaacacaatccttgctattgtcttttgagggccctgatctattttaagtaaaatgctctaactgcgcatgtcatctggaaggaaaccacaaaaaactcaatctgagacttgtcaccaatgtgctgcctgagtcaaagggtttccctggctcacctccatagatggcgagggtagaaggcaagacctgtcctgggtggtctaggcagaaggcccaggtttagggcatggcaggtgggtggtcagggaggtgaggtggggtcctggtgctgatgcaggggcagttgccgagggcttggcctcagaacaaggcaggagtccagccatgaggatgactcttgctgagtcactgagctgggcgaggcattcagaccccctgactgggcccagctggggcggcagatggtggagaggcctcagctgtggggggtgttggggagattatccactgatgaaccaaatggaggctgttcccagagcctgcttccaaccttgcacggccttctagagttcaaatctttcctgggggggcctcagagccctgtccatacctccgctcacagccccagcccttcctcttctcccatctggtttcctggccaggtttcggccctgcggagaaccctccaagggagcagtggaaaaagcttcacttggcagtaaagcccctacttgctgttccatccctgcagctggggtgaaataagccactgaccagtaaacaactgaggcttaaaccagcatgccagctcaggtggggagcccccagcactggttatattccctagattcctcactggataggaaagttgggcctcaggcactcttccctcctctgcagtcaaacagtgcagatgaagagccaggctctgttcccagtgctttatgtgctaacttggttgataatgttatccattctcattttgtagatgaggaaacaggcacagggtggtcaagggacttgttcaaatcactgatcccataagggtgagagccaagatccaggcatcctggctgggtgcggtggctccacctgtagtcccagtgctttgggaagctaaggctggatgactacttaagaccaggattttgagaccagcctggacaacaaagaccttatgcctacaaaaaattaaaaattagctaggtgtggcagtacgtatctacagtcccagctactcgggaggctgagatgggaggatcccttgagctgaggagttcaaggctacagtgagctgtgatcactgcactccagcctgggcaacaaagtaagaccttatctcaaaaaaaaaaaaaaaaaaaggccgggcgtggtggctcacgcctgtaatcctagcactttgggaggccgaggcgggtggatcacaaggtcaagagatcaagaccatcctggtcaacatggtgaaaccccgtctctactaaaaaaaaaatacaaaaagttagctgggcatggtggcaggcgcttgtagtcccagctacttgggaggctgaggcaggagaatcatttgaactggggaggcggaggttgcggtgagccgagattgcgccactgcactccagcctggcgacagagtgagagtccatctcaaaaaaaaaaaaaaaaaaatccagatctaggcattcccagccctctggactctaggaagtcgtctttccagaacagagccccgtattgtggagcaactggggggtggaatcaaaggtgagcaggacagggctataggaagaaaagacaaggtccccataagagtggcgagaggaacagagccaggacatcggaaagcaagcccctgtgttcccaaaccgcagaagagggagctctgatgttagacaagccaccctcctacaagcgaagggaaagtaactttgagcaaaaatgagcaacagaaaatgagatcaaggtcagatctcatacaaagttgcaagatgaaagaatgagcagcagaataacctccctgtgatgtggaaagtgtgccaggaaaacagacccaaactgtaacctctttcagaatgaggcaaggcagtgaggaaactatgtgaaaacacgaaagcagccgatcagagttgtaagcccgggcagtctgggttggaatgggtgccccgagccacgggaccatgatgcctctctagaaagacaggaccaggcattccaccagggttctagtcccaacagcaccactaacttgcttgtggccctaaaggattcattgtccctctctgggtctcaactatttagagctctactgtccagtatgggatcaaccagccatatttggcaatttaaattaaaattagctgggtacggtagcgtacccctgtaatctcagcactttaggaggctgaagcgggaggattgcttgagcccaggagttcgagaccagcctaggcaacatagcaggaccttgtctctgcaaaaaaaatgaaaaaattagctaggcgtggtggcacatgcctgtaatcccagctactcgggaggctgaggtgggaggatcacttgagcctggaggttgaggctgcagtgagtcatgattgtgccactgcattcctgcctgggcaacagaacaagaccttgtctcaaaaaataatttaaaaatttagttcctcagatgcattagccacattttattttatttttttccaagacagagtcttgctctgtcgcccagggctgtagtgcaatggcgagatcttggctcactgcaacctctgcctcccaggttcaggcaattctcctgcctcagcctcccaaatagctgggattacaggcacgtgccaccatgcccagctaatttttgtatttttagtagagacagggtttctgcatgttggccaggctggtctcaaactcctgaccttgtgatctgccgacctcagcctcccaaagtgctgagattacaggtgtgagccagcatgaccggccattagccacattttaagtgttcaggagccacatgtggatgtggctagtccaaagacagcacagatttagaatattctcatcattgtagaaagctctattggacgctgctgagtaaaagggtttttttggtttggttttgagattggagtctcgctctgttgcccaggctggagtgcaatggcacgatctctgctcactgcaacctctgcctcccaggttcgagcaatcctcctgtctcagcccccctagtagctgggattataggtacccgccaccacaactggctaatttttgtatttttagtagagacggggtttcgccatgttggccaggctggtctcgaactcctgacctcaggtgatccacctgccttggcctcccaaagtgctgggattacaggcttgagccaccacgcccggccaagttaaagggtttttaaacaagagctgggcagtgcaatggcatagctgtaaggcagcagggggtggtggggactgtggtaggtgggaaagcttgtgttccatctaaatggggcagctgctgcttgactgtaggctgtattgctggtcttctaattcttcaagtgaatcaggaattgggattttgtgaagactcacaatttctaaacaaaaagttgaagttttacagatcgtggggctcaagtataactcctcttgggctgtatccagccttgattctgtaatctgtggctcctgcctgtttttcctcggccaggccactcccttcttcccctcacttatatttttcacctggggttggaggctgggtagatggtggaattgatgaggaaccacttttttttttttttttttgagatggagtctcactctgcctctcataatgctgggattacaggcatgagccactgcacctgtcctggccagacatttttgaggccaccaccagacaaaagaggctcctcatcggccaggtgtgatggctcgcctataatcccagcactttgggaggcagaggcaagaggattgcttgaggccaggaattcgagaccagcctaggcaacataatgagacctcatctctccaaaaaaaaaaattagctagacatggtggcatgtacctgtagtctcagctacccaggaggctgaggcatggcttttgtgagctatgattgcaccactgcactccagcctgggtgacagagtaagactccgtctcaaaaaaaaaaaaaaaaaaaaaaaagtctgacctgagtctcttaaggatgaggctctggagcacctagtaaacttggtcccatttgtgtgactcaaagggacatgtccaaagtccaaagtgctgggggcaggggtggggcttaggtagggcatgtgacattcctgaacaggccaagcactgggtgaaactactcaggattcagaagcaggtgggatgggtgggtggaacatgataatcatcccccttctccttcctttccaccctacccttgctcacaactgcaggagctgaggatgggagagaactggggacgagggggccagagtgatttgcagtgttagtaatgcagctggttctatggaaggctcagttccatctgggatccctttatgagcagtggactaggtcttcacattcagcccaggattactaaagcataggaaagaggcagggaacatagacacagctcatgtaaacattccttttgtttatggccgaatcctagccactggactacctgaggcatacagatattctttggctatgggctgacatttgaatacagctggggcctcaggattctctgaaataaagggctgcctccctctggaggagccaggcagctcctcagagcagctgcccattgcgtgctggacaaggccatgtcaccacctccatggctccccagtttcccagcttgctgtatctctccaccgtaagagactgggagcaccttgatctgaagctctttgcagtgccggtggcagtgtagggggaagtagttgatgggagtgagggaaaggaattggcaaggaaccctgggcctctgtggctcactgcatcaagcagttcttggcaaaggtaaggtcaggatgggctgtgtcgtcttgggtggggtgaagacagggagcagtgggcatgcagatgcggacagggaagggtgcagtggcctggctggaggaggtagggccgtatcccacccagagtctgtcaccagattcatgcctgccccaccccaggctccccaggttcatcctgtgtcgtctcccccacctaccagtcatcttcttgtgagccctgggcttaggagtcaccatggcaactgaagagttcatcatccgcatccccccataccactatatccatgtgctggaccagaacagcaacgtgtcccgtgtggaggtcgggccaaagacctacatccggcaggacaatgagaggtgggtgtgggggctgggctgtgggggatccttggggatgtgggggcctgtttggctggcatgatggtccttatcctcctccctcttcccaagcaggagtggccctcgcttgggcgatagagaggtttctctctcatttggtgtcctctttggtagtggagacctggtcccaggtcctcacacctcttctcatcttcctgcagggtactgtttgcccccatgcgcatggtgaccgtccccccacgtcactactgcacagtggccaaccctgtgtctcgggatgcccagggcttggtgctgtttgatgtcacagggcaagttcggcttcgccacgctgacctcgagatccggctggcccaggaccccttccccctgtacccaggggaggtgctggaaaaggtacctggtttcctcactccctatgccccaccctacctgtcctccacctgccttgggctctatactgctgccttcttcttctttttttcttttcttttttgaggcagagtttcactcttgtcgcccaggctggagtgcagtggcataatctcggctcactggaagctccacctgggttcaagtgattttcctgcctcagcttcctcagtagctgggattacaggcacccgccaccacgcccggctaatttttgtatttttagtagagacagggtttcaccatgttggccagtctgatctcaaactcccgaccccaggtgatccacctgcctcggcctcccaaagtgctgggattacaggcatgagccactgttcccggcctgtaccgagttctaaagggaaaacaaaccagggcagtgggaggggtggggagagacacttgctggctctcaccaagggtggaattgactcactgtacctccactcacctccagccacccccatcctccacacatgccccaaacacacctgcctcttttctgagaactgttggcccatctcaccttcccaggctccagagcctaccagaagtgcccagccagtctggcattaaatgacatgtgccaaggttaagcagttcattcacccggtgccagacactggtgggcagtgccaaagcagcagtgacaagcccaggccccaggctgtgcctgttctaggagaagccatcacaggcctgaacctacagccaggctcttgtccccgttggcctcaggcctgggcctgagcaggtgggtgtcccaccttcattcctttacctgttcttccacctttaccttctggccatttaatggttttgggttttttgtttgtttgtttgtttgtttttaatagagacggggtttcaccgtgttagccaggatggtcttgatctcctgacctcatgatccgcccgcctcggcctcccaaagtgctgggattacaggcatgagccaccgtgtccagccccatttaatggttttcttactgactttactaaccagtgctgcttgatcctgaaagcataatagcagaacatggggaacttttagagacattcatgtccacttaggtgcagacagtttgggggaagaagtgtgtgtgtagagagaaaatgaagaatgattaagacaataacccttaaggaatccaagtgaaaagtatatagggattcttgtacctttttttttttttttttttttttgagatggagtctcactctgttgcccaggctggagtacagtggcataatctcggctaactggaagctctgcctcccaggttcacgcaattctcctgcctcagcctcccgagtagctgggactacaggcgcccaccaccacacccggctaactttttgtgtttttagtagagatggggtttcaccgtgttagccagggtggtctcgatctcctgacgtcatgatccacctgccttggcctcccaaagtgctgggattacaggcgtgagccaccgcgcctggcctttttttttttttttttttctggatctccccctgttgcctagacgagagtgcagtggggtgatcatagctcactgcagcctcaacctcctgggctcaaacgatccttccacctcattctcccaaaatgctgggattgcaggtgtgagccaccaagccctgcctaagctttcattttaaatatgttcagccgggcacagtggctcacgcctgtaatcccagcactttgggaggccaaggtaggcagatcacttgaggtcaggagtttgagaccaggctggccaacatggcgaaaacccatctctactaaacatacaacaattagccaggcgtggtggcatgcgcctgtaatcccagctacttgggaggctgaggcatgagaattacttgaacctgggaggcggagattgcagtgagctgagattgcgccactgcgctccagcctgggtgacagagcaagactctgtctcaaaaaaaaaaaaaaaaattagctgggggtggtgacacacctgtaatcccagccactcaggaggctgagacagaaggatcacatgagcctgggagattgagactgttgtgagccatggttgtaccactgcagtccagcctggatgacataggaagaccccatctccaaaaataaaaaaaagccagctcttcctttgagccccagtttcagttcaaagggccttctctaacttctccttcatctgaactcctgagacagggtcttgctctgctgcccaggctgaagtgcagtggtgcagtcatagctcactgaagccttaacctcctgggctcaagtgatcctcccacctcagcctcccgagtagctgggactacaggtgtgcgccgccaccatgcctggctacactttttttttttttttttttttttagagatgggatcttgctatgttgcccaggctggttcttgaatgtctgaggtcaagcaatcctcctacctcagtctcccaaagttctgggatgacaggtgtgagccactgtgcccggcctccaccccagtcttatttcaggacatacagagatggatgttgtggacccgcctccagagcatcaggcttggccctggggtcacagcactgatggttctgtgtctccaccttcttccccactaggacatcacacccctgcaggtggttctgcccaacactgccctccatctaaaggcgctgcttgattttgaggataaagatggagacaaggtggtggcaggagatgagtggcttttcgagggacctggtaagttctgtctccatagggctccctgccttcctgtcatagccctgataccttctgaccatcaccttccctccccaggcacgtacatcccccggaaggaagtggaggtcgtggagatcattcaggccaccatcatcaggcagaaccaggctctgcggctcagggcccgcaaggagtgctgggaccgggacggcaaggagagggtgacaggtggggtcaccaaggggcgatgatggtgggtgggcaggaggggtccccactgcaggggaagcaggggaaggttgaggaaagcctcctgtagccccagagaggcgctttcctggtatcttttgaaagctgttgagggccacccactgctcttccttccccacccccgcttcatgctgtttccacttgggctggaaaatgtgaccatgaccatgcggatgtggcttttccttccctcaccttcaccatgagctgtgggcagtggccatgacttacctgattctggatcaacaaagaagatgttcaaatacaattgacaaatgtaggccaataggtacagtggctcacacctgtcatcccagcactttgccaaggtgggtgaatcgtctgagcccaggagcttaagaccagcctgagcaacacagtgagaccccatctctacagagaatttaaaaattagcctggccttggacacacacctgtggtcccagctactcagaaggctgaagggggagaatttcttgagcccaggatgtggaggctgcagtgagctgtgactgcaccactgcactccatcctgggccacagaggtactaccccgaggtgctaccattcccactttttttttttttttgagacggagtcttgctttcttgctgttgcccaggttggagtgcagtggcgcgatctcggctcactgcaagctccgcctcctgggttcacaccattctcctgcctcagcctcctgagtagctgggactacaggcgcccaccaccatgcccagctaattttttttttttttgtattttttttttttttttttttagtagagacagggtttcaccatgttagccagggtggtcttgatctcctgacctcgtgatccaccaggttcggcctcccaaagtgctgggattacaggcgtgaaccaccgcacccggccattcccactttctatatatcaaaactgggatgcagaatgcaggttgcttgccctggggtgtggccaggcagggcgaggctgggacctgcatccaggcactctggcttctccagtaaaccaaaggacatccacaactctaacagaggcagttctgctgcctgttttagcagaaggacaaaagttggtctttggagcttagagaaggcagaacaggctgttggcatagcagcaacttgggcatcttaggaggccaaggtgggcggatcacttgaggccaggagttccagactagcttgggcaacatggtgaaacaccatctctacaaaaaatacaaatattagccgggcgtggtggcacgtgcctgtaatcccagctactcaggaggctgaggcatgagaatcacttgaatccaggaggctgaggttgcagtgagctgagatcacagcctgggcaacagagggagactccgtctcaaaaaaaaaaaaaaaaaaaaaaaaacttttaaaattcaactggggtgggggtttggcctcaaaagaatgaataagaggaccgcagtcaggaacttgagcctggggtcagtgctatctttttgcctatgaaatctgtcaatcccctgtgtctaagctgtgggggaggggtaggtggggagcaggctggggggcccttgtcccttaccctccactcttggcccaggggaagaatggctggtcaccacagtaggggcgtacctcccagcggtgtttgaggaggttctggatttggtggacgccgtcatccttacggaaaaggttggtgctctgggggctgtggtttaagggacctggggctagggaaccctccgagtggcagagaatggtggtagaatggcatgagagtaaaagagaagcaataattttagggtcacttaaaaaaattcagagatcagattgcctgagtattctggatcatctgaagggttaaatagtctttctggggctgggcgcaatgactcacatctgtaatctcagcaatttggaaggctgaggcaggaggatcacttgaggccaggagtctgagaccagcctgggcaacacagtgagaactcatcgctacaaaaaatttaaaaattagctgggtgtagtggagcatgcctgtaattccagttactccagaggcgctgaggcaggagaatcgcttgaaccccagaggcagaggttacagtgagccatgatcatgccactgtgctccagcctgggcaacagagcgaaaccctgtctcaaaaaaaaaaaaaaaaaacaaagccggtcgggtgcagtggctcatgcctgtaatcctagcattttgggaggctgaggtgggaggatcacctgaggtcaggagttcaagacaaacctggccaacatggcgaaaccccatctctactaaaaatacaaaaattagctgggcatggtgtcacccacctgtaatcccagctgtactcaggaggctgaggcaggagaatcgcttgaacctaggaggcggaagttgcagtgagctgagatcgcacctttgcactctagcctgggcaacaagagagagactccgatttaaaaaaaaaaaaaaacaatccctggattggtagaaattgtctctgagatctgggagcattgggagcatttggtggccaatggggctcgcagatcccctgaagttggaggcaggtcactcaaatacccaacatgttgctctgcagacagccctgcacctccgggctcggcggaacttccgggacttcaggggagtgtcccgccgcactggggaggagtggctggtaacagtgcaggacacagaggcccacgtgccagatgtccacgaggaggtgctgggggttgtgcccatcaccaccctgggcccccacaactactgcgtgattctcgaccctgtcggaccggatggcaagaatcagctggggcagaagcgcgtggtcaaggtgaggtccctacacccccacagaggactgccctgggagatgtatgtcctctagtggcatgaggccctctgccttctctcctccagacgcacgttctaggaacaccttctgtgcctttgcatgcttagttcttacacacctgagacactggcccatttgattcctggcagcctctgacttacccctcagacctgaagttaattccccttctgggaaggcctcctggctacccgctgcctgagactctgaaactctgatacagtcatgcgccacttaatgatggggatacattctgagaaatagtccttagatgattttgtctttgtgcaaaagagtgcacttatgcaaacctagatggcacctagtctagatggcgtagcctgcccctaggctgccaacctgtgcagcatgtgactgtcctgaatactgcaggcagctgaacacaatggcaagtacttgtgtatctagccatagaaaaggtaaggtaaaaatacaatataaaagcttcgttataggccagcacagtggctcatacgtgtaatcccagcactttgggaggccgaggcaggtggatcacttgaggtcaggagttcgagactagcctggccaacgtggggaaaccctgtctctactaaaaatacaaaaattagccaggtgtggtggcacacacctgtaattccagttactcgggaggctgaggcacgagaatcacttgaaccctggagatcaagcctgtggtgagccgagatcgtgccactgcactctagcctgggcgatagagtgagactctcagaaaaaaaaaaaatctccattataatcttacgggaccaccatgtgcagtctgtaatggactgaactatcatgcagtgactatatttcacatctttaatatcctggtgttcactttgctttgtcatcttttgtaaaataaacctcttggtttaccctctcccaccccctacttcatcccctctctgaactatatgtgggaataccagcagttgccaaactcattctgtaaagggggctggatggtagatactccaggctccgtgagtcattgtttctgtggaagttcttcaactctgctgttatgtcaggaaagcagcttgggcactacgtaaacaagtgagtactgccatgctcctggaatagtttatctgcaaaaacaggaggcagaaaaagtagaaataggccaggcatggtggcttacatgtgtaatcccagcactttacgagtccaaagcgggtggatcgcttgaggtcaggagttagaaaccatcctggccaacatggcaaaaccctttctctactaaaaatacaaaaaaattagctgggcatggtgtcaggcacctgtaatcccagcttctctggaggctgaggcaggagaattgcttgaacccgggaggcggaggttgcagtgagccgagatcacaccactgcactccagcctgggtgacagagcaagactgtctcaaaaaaaaaaaaaaattagaaataacccaaatgtacatatataatgaatggataaaaaattgtagcatatccatacaatggaatatcattcagccataagaaagaaatggcaggccaggcgcaacagctcatgactataatcccagtgctttgggaggccgaggcaggaggattgcttgaagccaggagtttgagaccagcctgggtaacatagtgagaccccatttttacaaaaacttttaaaaattgaccaggcatggtggcacacctgtagtcccagctatttgggaggctaaagtgggaaaatcgcttgaccccaggaagtggagtgtatagtgagctatgattgtgccactgtactccagcctgaggcagtagagtgagatcctgtctctaggaaaaacaaaaaataatgacatacgtgctacaacatggataaaattgaaaatgttatgctaagtgaaagaagccagctggacgcagtggctcacgcctgtaatcctaacactttaggaggctgaggtgggcacatcacctgaggtcaggagttcaagaccagcctggccaacatggtgaagccccgtctctgttaaaatacaaaaattagctagcatgatggcgggtgcctgtaatcccagctactgctcgggaggctgagacaggagaatctcttgaacctggaagacagtagttgcagtgagccgagatcccaccactgcactccagcctgggctgctgagccgagactccatctcaaaaaaagaaaaagaaaaaagccagacatcaaagaccacatattgcatgattccatttatgtgaaatgtccagaataggtaaacacataaagaaaatagactagtggtgggtggggtaggtggggagtggcagtaacttctaggtacaggatttcttttcagggtgatgacgaaaatactctagacttaacatagcagtgatggttggacaactttgagtatactaaaacaactgaattgtgaattgtatactctagatgggaaaatttcatatgtggattatatctcaaaatttttttaagaaacaggcggtgctgggcgtggtggctcacatctataatcccagcactttggaaagctgaggtgggtagatcgcttgagtctaggactttgagaccagcttaggcagcatggcaacaccccatcatctacgaagcacacaaaaattagctgggtgtggtgatgcgcatctgtagtcccagctccttgggaggctgaggtgggaggattgcttgagcctggaaggttgaggctgcagagagctgagatcatgccactgcactatccagcctgggcaagagaggaagactatctcaaaaaaaaaaaaaaaaaaaaaaaaaggcagaatccagatttggcctgaaaaccagagtttgtcaagccctaggttacaccatctctagaaaacaaagcctgggagaaagaagaaaaaacaggttgatttttaatggtttagcttgcgtggatccaggtcctgacagttatggaatctttcaaggacacatttgaccagatgagatttggcaggcgtttgtgtagagcctcacagtccagacagtgcctcaccgtattatgatgtgggggtgggggcgggcttctggtgctcttgtcctccacacaggcctgaaacagcacaggactggggaggtaccattggaagcacccgcaaccctaaaggcactgaccctaacctcacgtctccccactagggagagaagtcttttttcctccagccaggagagcagctggaacaaggcatccaggatgtgtatgtgctgtcggagcagcaggggctgctgctgagggccctgcagcccctggaggagggggaggatgaggagaaggtctcacaccaggctggggaccactggctcatccgcggacccctggagtatgtgccatctgccaaagtggaggtggtggaggagcgccaggccatccctctagacgagaacgagggcatctatgtgcaggatgtcaagaccggaaaggtaatggctgggagtgagcagcagtgctgccacgtggccttggccttggtggcggcttcctctgggtgtgtggaagaggtgggcagggacttcagcagcatggagagccatatcaggtgggctgtctggttgggggagggcactacgtggagtgtttgccatccttctgccttaaatgtctcatttgaaatgttagaaccaaccaggtgcggtagctcacatctgtaatctcagcactttgggaggccgaggcgggcggatcacctgaggtcaggagttcaagactagcctggccaacatgggaaaccctgtctctactaaaagtacaaacattagtcaggcgtggtggtggtctgagtagtcccagatacttgggaggctgagacaggagaattgcttgaactgggaagcggaggttgcagtgagccgagatcacaccactgcacttcagccagggtgacagagtgagactctgtcaaaaaaaaatattagcatgtccactgagaggacaagtgggggtttaggacagggaccctttcccacagcagacctggtttccagcataaaggtctgatggggtggccagggaacaggaaggacctcctccctcatgcccatatcccggtggaatctttcatttttttctgcttcacctaaaaccttgaccttgatttgacctcgggccacatctccaaccttctctaagaatccaagctggaagtccagcttggaatccgagggagcatccgtgtacacagcctacttcaccatccccgaggtgccctccaaactgccccatgaaggaagattctagaaataacattgagcaccttctctatgccaagagctgtttgagctagacatgtgaagatgtcattcacccctagaccctgcaaggtagccaccgtcaagtccacttgacacatgaggaaactgaagcccaaggggtgaggtagttagcccacgatgacagggccagcagatggcaaacccggggtggagcctggcctccccgtagagaaggtgtttaacctcgtggcgcgccttccctggatgggctctgctttgggacagctgggcggatcttcctcccttccacccttacgggcagcttccctccctgtcctcgtcccaaggtgcgcgctgtgattggaagcacctacatgctgacccaggacgaagtcctgtgggagaaagagctgcctcccggggtggaggagctgctgaacaaggggcaggaccctctggcagacaggggtgagaaggacacagctaagagcctccagcccttggcgccccggaacaagacccgtgtggtcagctaccgcgtgccccacaacgctgcggtgcaggtgtacgactaccgagagaagcgagcccggtgagtgctggcagcgcagggtgtagggggtggctctccatgggtctggctctgaccctcggctgtctctgcagcgtggtcttcgggcctgagctggtgtcgctgggtcctgaggagcagttcacagtgttgtccctctcagctgggcggcccaagcgtccccatgcccgccgtgcgctctgcctgctgctggggcctgacttcttcacagacgtcatcaccatcgaaacggcggatcatgccaggctgcaactgcagctggcctacaactggtaaaaatggggacagggcatgggggtgcattcctggaatcccagcactttgggaggctgaggtgggaggatcacttgagcctaggaggtccaggctgcagtgagccttgatggccccactatactccagcctgggtgacagagcaagaccctgtttctttgttttttgtttttttagttttttggttttttggttttttggttttttttgagaccgagtttcactcttgttgcccaggctggagtgcaatggcgcgatcttggctcactgcaacccccacctcccggattcaagcgagtctcctgcctcaacctcccaagtggctaggattacaggcatgtgccaccatgcccagctagttttgtatttttagtagagatggggtttctccatgttggtcaggctggtctcgaactcctgacctcaggtgatccgcctgcctcggcttcccaaagtgctgggattacaggcatgagccactgcacccggtcaaccctgtttcaaaacaaaaaaaacaaaccgggtggcaagcagtgggtgagggttcctgctgggtgcagcctaggaaccccaagaaaaggagggtcctgctcaagtgctggtgctgggctcctcatgaaggcaggacacctcattcagtgctgaggtcaagagggaacctaggagttcacgcaaatccagggaaggcgtgggctcacctcctggggtcaggactcagggatccagtagcaggacactaccccaactaagctcccagtgagcgtgcagccaaatgcgtaactgtcgggctgttaaaagatgcatgggacacagctggcgggagtgggcagtgcaagggggcggtgagaactcaagttcagaaactgactgccctggcctgcgcccccgccctgctgtttgcagcctgtggacctggggaagggacagggtgctttcctcagtttccccatctgtaacatgaggaagacagcattttctccttcacaaggccattgaaaagatgcaatgagtgttagaacagtgcctctattggtcagagctcaatagcagctattaggattgggtgagataagtcatgtacagaaacagtgttcatgactgggtactgtggctcacacctgtgatcccagcactttgggaggctgtggcaggaggattgcttgaggccaggagtttgagaccaggctgggcaacataacaagactctgtttcaaaaaaaaaaaatttataaactagctgggcatggtggtacatgtctatagacccaactacttggaaggctgaggtgggaaaattgcctgagcccaggaatttgaggctgcagcaagctatgattgtgccaccacactccagcctggacaacagagacccacagagaccctgtctcggaggaagggaggaagggaggaagggaggaagggaggaagggaggaagggagggagggagggagggagggagggagggaggaagggaggaagggagggagggagggtcaggcgtggtggctcatgcctgtaatcacagcactttgggagactgaggcaggcagatcacttgaggtcaggagtttgagaccagcctggccaacatggtgaatccctgtctctactaaaaatacaaaaattagccaggcctggttgtgggcacctgtagtcccagcttgtagtcccagctactcaagaggctgaggcaggagaatctcttgaatccgggaggcggaggttgcagtgaacccagatcgagccactgcactccagcctgggcgacggagcaagactgtctccaaaaagaatattcaatactcccaagcatgtccctcacctcttagctgagagcagccagtgccctgatggcggcagacagctgccgacatattcccagggctgccgacatattcccaggcactacaacatcatagttaagagcacaggccccagaagcagctgcctggttcagctttctggcttgtcacatgttatatggcaagtcttgggccagccacttgacttccctggacctctacttcctcatctgtaaaatgggggtggtgatcattgccatctcatagggtggctgagtgggattaaaggagaacgtgtgttaagtttttaggaccttaccaggcatacattagcattctctattgcgagagaccctgcccggccacacaggatgggtgttgaagttcttctcggagagagttgctggctgggcgtgatcacacatgtagtcccagcactttgggaggctgaggttggggggttgcctgagcccaggagttcaagaccagcctgggcaacatggcaagaccttgtctcttctaaagagagattcctgggtgaaagcagcttccccattctgggcctgtttgttcacaggcactttgaggtgaatgaccggaaggacccccaagagacggccaagctcttttcagtgccagactttgtaggtgatgcctgcaaagccatcgcatcccgggtgcggggggccgtggcctctgtcactttcgatgacttccataagaactcagcccgcatcattcgcactgctgtctttggctttgagacctcggaagcgaagggccccgatggcatggccctgcccaggccccgggaccaggctgtcttcccccaaaacgggctggtggtcagcagtgtggacgtgcagtcagtggagcctgtggatcagaggacccgggacgccctgcaacgcagcgtccagctggccatcgagatcaccaccaactcccaggaagcggcggccaagtaagtgaggctgggagctcggctgcctataatgcccatggcaggccactgctgggaactggataacctggcatcccttgtggactgcctgctgccatccctaccctcaaagatctattccctacccaacagatcaggtgacccacttaaaatgtgaatcaggctgggcgcggtggctcatgcccgtaatcccagcactgtgagaggctgaggcaggaagatcacttgaagccaggagtttgaggctgcagtgagccatgattgcgccactgcactccagcctgggcaacaggcctgggagactgaccctgtctcaaaagaaaaaaaaaaaaaaaagcacgtatcagatgtggctcctgcagcctcccatcttgcatgtgataaaacctaaactccttcctgcagctccagccggcctcccccgatttgccttctagcctcccccttccatgctcctcgtccctggaacatgttccagctgacatgttccagccccactggcttcctctgctccttcaatgcacagcttggacccacctgaaggccttttgcaatggctattcctgctgcccagaaagcttccccccgcccctgagctcccttccaggcaggcttctccttctggcttcagcccaaagatcccctccttggggaacacttttctttctctcacagctgaatagcaccctctttgcctggtctctcccacacttgtcactgtctgaaatcctccttgtatacttgttcttttcccactcaagtggcgtgaaagtagggggccgcagtcacgcctgcatttgtccggcctagaatgacactggcttgtggcgcgtataccattctgggttgagttgcgtattgggtgccttctaggggctggggtctgtcctgggcaccggtttggttggtggccgctgcccttggcgctcctgttcctgctctggccccatgccagcctctcacctgcgctccgtctcctccaggcatgaggctcagagactggagcaggaagcccgcggccggcttgagcggcagaagatcctggaccagtcagaagccgagaaagctcgcaaggaacttttggagctggaggctctgaggtgggttgagaactagaggaggagactggcaggggccgagggtcttaggacagcagctggtgtgggcagcaggcctgggtggggtgtcgatgagacagtgcacggctacagcataagccaaggccgtggggggactgggctgtctcccgggtcttacctgactctgccttctccccagcatggccgtggagagcaccgggactgccaaggcggaggccgagtcccgtgcggaggcagcccggattgagggagaagggtccgtgctgcaggccaagctaaaagcacaggccttggccattgaaacggtgagtggggggaggcattaagaagagggtggccttgagtcctggaaaaggcccattccctacagtccctgagactgtataggacaccaggtcccccaacataaagccctatccaagtactttgcatttgcaaagtcctttgccttgtaggattcattgactccattgctggaaggtaaggattagaacacccattttgcagctgggcgctcatgcactggccaccttggcacaagtgctgtgtatgcttcataggcattatcttatttaatgcttgaaatcccattaagaggccgggtgcagtggctcacgcctgtaatcctagcactttgggaggccgaggcgggtggatcacctgaggtcaggagttcaagaccagcttggccaacatggtgaaaccccatctctactgaaaatacaaaaaattagctgggtatggtggcatgtgtctgtaaccccaactacttggtaggctgaggcaggagaattgcttgaacccaggaggtgtggaggctgcggtgagctgaggttgtgccactacactccagcctgggcaacaagagtgaaactccatctcaaaaataaagtaaataaaaataaatgtaaaaagaggcctagtgtggtgcctcaggtctctaaccccagcactttggaaagctgagatgggaggatcatttgaggtcagttcgagaccagttcaagactagcctgggcaacatagcaagacctcatctctacaaaaacaaaattttttaattgactgggtgtggtggcacatgcctgtagtcccagctacccaggaggctgaggcaggaggatcctttgagccaggagttcaaggctgcagtgagtcctgatctgcattccagcctgggtcaaaaaataaagaatgattgatttttcctcttccaggaggctgagctccagagggtccagaaggtccgagagctggaactggtctatgcccgggcccagctggagctggaggtgagcaaggctcagcagctggctgaggtggaggtgaagaagttcaagcagatgacagaggccataggccccagcaccatcagggaccttgctgtggctgggcctgagatgcaggtgagagttggggaaggtgtgttggtttcaggaccaaccttgaaaccaggaaggcagagccaaggcggaaaacacaacatctggaaagattgtggggaagggaggggtgagtgacctgacccacgatgcagggacattcacacagtgtcacgctgcatcaacgtcaggcactgtactagacccagcagtgagccagagctccggaggagacaggaaatggatgggacgccagtctgacaggcatttccaaggcagtcaagcagggtggtcagatgcaggggaggtgacccttcaaaccagctgacttaaggagggtcactctgaagtggccagggtttgacgcccatctcaacttcctcctgttctcaccctccaggtaaaactgctccagtccctgggcctgaaatcaaccctcatcaccgatggctccactcccatcaacctcttcaacacagcctttgggctgctggggatggggcccgagggtcagcccctgggcagaagggtggccagtgggcccagccctggggaggggatatccccccagtctgctcaggcccctcaagctcctggagacaaccacgtggtgcctgtactgcgctaactcctgattaatacaatggaagtttctgggcatttacaatttcaacacttttctcttgtctgacattggttggggttaccagggagcttaatggtggggaggggaggtgcccctggcatcttttttttttttttcgagctggagtcttgctctgtcacccaggctggagtgcagtggtgtgatctctgctcactgtaacctccacctcccaggttcaagtgattctcctgcctcagcctcctgagtagctgggattacaggcacgtgccaccacgcccagctaatttttgtattttttagtagagatggggtttcaccatgttggccaggctggtctcgaactcccaacctcaggtgatctacctgcctcggcctcccaaagtgctgggattacaggtgtgagccactgtgcccggtcaacatctttagatagttacaggagactcttctcctccataaaggggagaggaccccgaggcaggggaaggatgagctggaagtcacccagtaggaatgtggccccaaagccttgtgcactgggcttcctagagcccagataggggtgatgatgccacgggtgggggcatggggcccacaatggcaacatctcaccactggttctccaggagcccagctgcctggtagctctcagctgttgcagatgcaacccagcttcccattcgggaggcgccctccagcgccacctgctggagcacccacagcaccagcagacgtgtcaggcttgcacccggtgctgtgcgcttgtcccttcccaggtgggggtgtcaggttggggaggaggaccctgcctagggcagtaggaattgggcatctccttgagcttccggtctgggctgtttgggagcactgaaggaggagtgcccttatcccaccttctcccccacaaccagtatggggtcctcatttgagagaaggatccaggtgcagtcagcctgggtgcactagccctttggggccaggaacagttgtaggtgccaggcctgccccgtctctgccgaggaagtaaaaagatcccaggggccgagtgcaagagcttaggcctgtaaccccagcaccttgggaggccaaggcacaaggatcacttgagactaggagttcgagaccagcctgggcaacatagcaagacccccatctctaccaaaaaaaaaaaaaaaaaagcaaaagccagatgttatggcatgcatccgtgttcccagctactcggggggctaaggtgagaggattgcctaagcccagaagttggaggcagcagtgagctatgatcataccactgcagtccagcctgggtgacagagggagaccctgtctctataaaaaaaaacaaaacaaacaaaacccttaaagcctccctaaagccctcattttcaccttcctgtaatattgagtggaaaaagcccgatccccccttaaaccacctccctccctctctgccctgcccctgaccgttgctgcaggaggaacaccccacggagctgactgatcttattttaaactcatgggaacaaattttgagggaggtgcagcttctctggctgtgctgctctgtcttgtgtgcgatccgctttgagacaaccattcacaccacctctcctctcagcctcctacacccctgcccactttctctcacctctttgagaaaatagaagcaaattgggtaggaaggcccttcccagcaacaaacctaacaaactgctggcatctagactgtcctccctcctcttcccaccctgggctcctccccttgggctctaggagagagggctgcattccttcactgattgccgtcctctcctgtgctgtcaatttttttttcttttttttttttttcttgagactgagtctcgctctgtcacccaggttggagtgcagtggcgtgatctcagctcactgcaacctctgcctcctggattcaagtgattctcctgcctcagcctcccgagttgctgggactacagtcatgcaccaccatgccctgctaatttttgtatttttggtagacatggggttttgccatcttgtccagactgatcatgaacccctgacctcatgatctgcctgccttggccccccaaagggctgggataacaggtgtgagccactgtacccagctgatatgccatcaatttcttctctcctgcatcatcatcatcaggatatagacatgtctactctgtccatataaaacaactcccttaaccctatgagcccctctaacttccacctctcctttttccatcacagccaaatttttccagagttctctgtggtctcactttccattcctcatctctcattatctcttcaaaccactccagatagggccaaacgtggtggctcacgcctgtaatcccagcactttgggaggccgaggtgggtagatcacctgaggtcgggagttcaagaccagcctggccgacatggtgaaaccctgtctctactaaaaatacaaaagtgagccaggtgtggtggtgggtgcctgtaatcccagctactcggcaggctgacggaggagaatcgcttgaacctgggaggcagaggttgtagtgagcgagattgcgccattgtactccagcctgggcaacaaaagcaaaactccgactcaaaaaaacaccccagtttgcttctgtctctgccccttactttatggaaactgctttattcggcatcaccagtaatgtcccgttgctaaatccagtagttgatcggtcacttggcacagttggccattcctcccatgctgggctttcctgacatcacctgttctagttttctttctcgcttctctcagtaggttccctaaggcccacttctcatgctgacattcttgtccaatcgcatgacctcagatggtctctataccactgacctcagaatccattactccagctccgacctcacccaagagctctggactcatttccaatccatgccttgatgtctccacgtggacctcaattggtgatcaggctttggctcttgccaatgaaatgcaaggggaaatgacatcacatgcctgttcttcccttttccatataaatgggtgaccagcaatgttccaagtggaagctgctccaaccacctgggtcccagggagaaaatggcatgaggtgcagccacagctgacctgcaacagacatgtggcaggagtgagaaatgtttgctgtattaagcaacggagatttggggggttttgttaccacagtataacctagcctatcctgactactttgtgtgcctcacaggattgtaagatctcataggtcataggggaaactcctctaaattgtatgcaaggggccaggtgcagtggctcacgcctgttatcccagcactttgggaggccgaggtgggtggatcacctgaggttgggagttcaagaccagcctggccaacatggtgaaaccccgtctctactaaaaatacaaaaaaaaaaaaaaaaacacaaaaaaaactaggcgtggtggcacacgtctgtaattccagctactcaggaggctgaggcaggagaatcgtttgaaccccggaggtggaggctgcagtctgccgagatcgtgctactgcactccagcctgggagagggcaaaactccatcttaaaaaaaaaaaaaaaaaattatatgcacgaagaggggcccagcacaggccatagagtggggaagacaggacttgctggaaatacagtgagcttctgtctccaaaaaaaaaaaaaaaaaaaaaaattagattaatttttttttaactttacatttttaaaattttaattattaggtttaacctcaaatttttttttttttttttttttgagacagggtcttgctctggcttggtggttaaatattttgaatttcatccctggggcttagggttgccccaagcaacctgtttactgaaagaagcctgaaatatacattgaatttttttttctttttagacagagtctcgctttgtcgcccaggctggagtgcagtggcatgatctcggctcactgcaacctctgcttcccaggttcgagcaattctcctacctcagcctcctgagtagcgagaattacaggcgtgtgccaccacgcctggctaatttttgtattttttgagacagagttttgctactgttgcccaggctggagtgcaatggcacaatcccggctcactgcaacctctgcttcctgggttcaagcgattctcctgcctcagcctcccaggtagctgggattacaggtgcctgccgccacacccaggtaatttttgtatttttagtagagatgaggtttcaccatgttggccaggctggtcttgaactcctgacctcaggtgatctgcccgccttggcctcccaaagtgctggggttacaggcatgagccacagcgcctggccctagttttttatatcttaaaaattaggcctatgtctaatccaaaaaaagtgtttttagattaaattagctaggtgtggtggcatgtgcctgtagtcccagctactcaggaggctgaagtaggaggatcacttgagctcaggaatttgaggctgcagtgagctatgacggcatcactgtactccagcctgggcaacagagtgagaccctgtctcaaaaacatacatagagaacagtgtgatctctgaagaagttcaacacagcctgtttttctctagcactagaacaaatggcttttctttggttgaataccaaagtaattgatgtgttgaaggaccccctttataagaaaaatctgtgtctttcaacagcgaacacattcagcatggtaagatgctgtttaccgaatcagtttcctcttccacttacgcccacaactaatctgtgtcccagcttcccttgtcctcagacactgccgtgtgaccgagttgtagccaatggaatggaagtggaagtaataagtgctaatttcctgtctttccataaaaacttggctcctgcaacctccatacacatcatctgcctacatgatgcaaacaagctgggcagtcccaggagccacgtgttgaaaatggcagaatcacagaacaggagatgcccgaattcctgaatcgccgcttgcaggagagctgtctcccagtcggcagcatctgattaagatttaatatgagttagaaataaaataatgttctttcttttttttttttttttttgagacagagtcttgctctgcctccaggctggagtgcagtggcacggtctcggctcactgcaacttccgcctcctggttcaagtgattctcctgcctcagcctcccgagtagctgggactacaggcgtgcaccaccacacccagttaatttttgtattttttgtagaaatgaggtttcaccatgttggccaggctggtctcgaactcctgacctcaggtgatcccccacctcagcctcccaaaatgctgggattataggtgtgagccaccacgcctggccaactctttaactcttttgtagcaatggggacttgctatgttacccaggctagtctcaagctcctgacctcaagtaatcctcctgtttcagcctcccaaagtgctgggattacaggcatgtgccaccacaaccagtctagaaataaactatcatgtttgaggcactacacatcttgaagtttgttacagtagttagggttatttttaatcacagaaggagagccttgaagactgagactgcctagaggaacagcaaatgtacaggtactgatctcctgccctccgaggcgcagtcattgagtggaacaaacaaatgaaacttcttacacagtggcgtggtgatcattcatttattctgaaggcatatagctgattccagaaggctattactgcacatataacgtgactccactatgttccctagatcaaatatagatactccagggcccaggtcagctcagcctttccccactccccacctccagatcaagggctctgcaggttcttcctgagcccaggccagccactggacatggaacgccggcaccagtctgactgcgagccacgtccctgtaggccaaggggacttagaagccctcctgtgagtcttcagtgctaccctacaagcctcaggatgctcgggtgcagattcttttagactgcccgtgctcacactctcctcctcaactctcttttttaagatcacatatggccaggtgcaatggctcacgcctacaatcccaccactttaggaggccgaggcgggtggattacctgaagtcaggagttcgagaccagcctggccaacatggagaaaccccatctctactaaaaatactaaattagccgggcgcggtggcgggtgcctgtaatcccagctactcaggaggctgaggaaggagaattgcttgaaccccaggggcagagattgtagtgagccgagattgcaccactttactccagcctgggctaaagagtgaaacttctgtctcaaaaaaaaaaaaaaaatcacatatggccaggcatggtggttcatgcctgtaattgcagcactttgggaggttgaggtgggaggatcacttgagcccaggaattcaagaccaacctgggcaacataaggataccccatctctacaaaaaaatacaaaaatagtgtgctgggggtggtggtgccgcctgtagtcccagctactcaagaggctgaggctggaggatcacttgagcccaggaggcagatgttgtgatgagtcgagatggagctactgcactgcaacctgggtgacagagtgagaccttgtctcaaaacaaaacaactcaatgtagctggatttacacagtcagccttctgatgtcactgtaaatggttagagccaaggagcctaggagccagccagggacatgggagtcaggcaggccaagggctctgtcctctggggctggagagagaggacccaccaggctggaggaagagccaacaggaaggagaaagggctgcagggcaggcacagggacagcccctgacccagtctcctaccttgactgcagcaggccaggtagtggggtgcccacagctggaaacgcacctcagttttttgttttttgttcttttgagacggagactcatctgtcgccaggctggagtgcagtagcacaatcttggttcactgcaacctctgcctcccaggttcaggcgattttcctgtctcagcctcccgagtagctggaactacagtaggcgcgtgccaccacacccaggtaatttttagtagagacagggtttcaccgtgttagccagggtggtctctatctcctgacctcgtgatctgcccaccttggcctcccaaagtgctgggattacaggcgtgagccaccacacccaccgcacctcagttttgtgcaccaatagcttcttcaagcacaggtctgtccctgccactgtcctgctttaagcccctcaacgttcatcctatacgtgtcccccaaaaagcgcgagatgatttaccgcagcaccattcacagtggtaggaccaggttaaactgaatttttttttgagacagagtctcactctgtcacctaggctggagtgcagtggtgcgatctcagctcactgcaacctctgcctcccgggttcaagcgatcctcctgcctcagcctcccgagtagctgggattacaggcgcctgccaccacgcctggcgttctatgcaaccattcagaagcccgctggcgtgaaagtactgcgtacaattaagtgttcaggtacaggctctggaaccagactggccaggctgccacctctcggggcctgtttcctctctggggaatgagaacagtaacagggctgtcgtattgtgtgcaactgtacaattgtgagataagataatgcacgcaaatagcacttagagcagggtagcttgtgttagcagaacagcacatacataaaatgaatgttaagatatggaaatgggctagacacagtggctcacacctgtaattctagcgctttgagaagccaaagcaggaggatcacttgaggccaggagtttgagaccaacctgtgcaacacagtgatacccccatctctacagaaaaacataaaaattagccgggcatggtggtgcatgcctgtagtcccagctgttcagcaggctgaggcaggaggactgcttgagcctgagaggtcgaggctgcagtgagctatgatcatgccactgcactccagcccaggtgacagagagagaccctgtctccacagtaaaattttaaaaagtcctctgggctcctaggccgccccagctggcttctgcgtcgcctctcaccagctctcccagcccccaacccccactcccccaacctccctggagcacttggtgctccaggccctgtgacctagatctgtttcttttttttttccccaccttgactggagcaggccaggttggcagggatggtaggggtgcctgatgcgcttgaaacacacctgctttgtgcacaattttttttttttttttttagacggagtctcgctctgtcactgggctagagtacagtggcatgatcttggcttactgcaacctccacctcctgggttcaagcaattctcccacctcagcttcctgcgtagctgggactacaggcgtgcaccaccacacctggctaatttttgtattttttgtagagatggggtttcaccatgttggccaggctagtctttaactcctgacctcaaatgatccacccccttgggtggatcccagagttctgggattacaggtgtgagccactgtgcccggcctagatctgttccaatttctgttgtcactgtaaatggttagaaccaaggagcccaggagccagtcagggatgtgggacccaggccgaccaagggctccgtgctctggggctggagagtgctcagaggacccaccatgccggaagaagagctgacaggaaggagaaagaggtgcagagcccaggggcctctctggcctccctgccttcccatgccattccctcagctaagaaccaatctcctctgcactaaccctttcctctccaatccctaccagccttctacatgggatacccagccccttcaccaaaccctaaatcaggtcctaggtgtcttctactcccacccccaacgagcactttcctatgttattgtagaggaagccagctgcccagtacccagtgaatcccctgggcctagcacaggagttgaggctcagtacatgtctggtaaatttctgctctcctggacacgggggcctcttgggccacttggctaagctatcatgcagatagaatgagtaacatctgcaaagaacccgcagcacagagtctggcatgcggtacagtagtttaaaaaccacagatggcaggggatagatgcccagaacagtgcctagtatatgataggagcccataaaaagagggaacagtgtttctcaacattactggaagaattccccggcattcaagttgcaggtttctgagcccatccctagagcttctaactctgaaggttggctgcagggtccaagaagttgcatttattttattttttgagacatcttgttttgtcgtccaggccggagtacagtagcatgatcatgactcactgcagccttgacttcccaggctcattcaatcctttcactgcagcctccccagtagctgggactaaggcacacaccaccacacttggctaatttttgtatttttttttttgtagagacggggtcctgccatgtgacccaggctggtcttgaactcctggactcaagtgatcttcccacctcagcctcccaaagtgctgggattacaggccaggcgtgagcctccaagacgggccaaagttgcttttttttttttttgagactgcctggctctgcctcccaggctggagtggcaccattacggatcactgcaacctctccctcctgcctcccaggctcaagccatcctcccacctcagcctcctgagtagctgggaccacaggcatgtgccaccacatttggctatttttgttattttttgtagagatggggtttcaccatgttggtcaggctggcctcgaactcctgtactaaatccacccaaccttggccttccaaaatgctgggattacaggcatgagccaccacacctggcttgaatttgcattttaaagaaatatccagccaggctttgtggctcatgcctgtaatcccagcactttgagaggctaaggtgggaggatcacttgaggtcaggagtttggggctgcagtgagctatgattgcaccactgcactccagcttggacgacagagtaggactctgtctctaaaaaaaaaaaaaaaaaaaaagaaagaaaagcaaaaaagagaaatagaaatataccacaggtggtctaaggaccacactctgagaaaccaactcattgacagacgagtatttattaagcagctactatatgccaggttcaagttggtcttactctagggatagagaagagaacaagaaaagtctgtgccttcatggagtttacattctagtgagggtagaaaatatcaagaatataaatacatgtagacagtcagtgacatcaaacaagtgggcggtggggacaccacatgagcatgggtggcaggagggcctctctgtgaggtcactgtgggtagacggagaagccagccagcaaactggaggaaaagcacccagacggacgtccttccctaagctccctcaacccaggccctgagccaagaatatctgaaaggaaaccaagtcaaatagtgaagtcccgccaggaccagggtaggcaggacagaggagccggtgacagggaaggctgtggatggcttcttccctcctgggcatggtgccccaagcttgctctggctgggggcggaggtctgactcccgcctttcaggaaacctggccctcacaccacctccctcactcaagcgtccctagcatctcggaccccaggactgagcaggcagggtgtgacactgcccggtcccggcaccccaggagcaccgcctggatggagggggcctcccgcgtatcctccctgatttgaggcccgggtcctcaggatcccagagaacgtgacgtcaccaaagagaggctgacccccatcccagcaggtagaacaacacatgaggaaggcgtgagactgggacctcctagcagggggtggggagctgtgtggcacagcaagactcccagggcaggtgggcagccaggacccggggctccagcgtcacttcttcttggcgcggtctgctgcgtccagggcagccatgttgcgggcggccgtgatcaggtggatgacgctgatgagcgacttcagcaaggcgatgggggcagtgacccagaggcccatccggaacagtcccacagagccaactgcaggaaggcagcaggggagtttggggcccgaaggagggggcctccatctccctgggcaggccagatccccctcccatcctcctgcccagcccctcatctcctacctaaaggtccctcagagaaatggaacaggtagaggaggcagtagaagagctcattcccagcacacaaggtgaacagagcaggctgcacacacagcaaacaggccacgttagcaagaggcaggcgtgtgccaccccctgcccccccagcactaatgaaggcacaatctcggcatattacttctcttatttttttttcttttttacagacagggtctcgctctctcatccaggttggaatgcagtagtatgatcatagcactgcagcctcaaaactcctggtctcagccaggcgtgtggctcatgcctggagtcccagcactttgggaggctgagacaggcggatcacctgaggtcaggagtttgggaccagcctggccaacgtggcgaaacccctctctactaacaatacaaaaattagccgagtgtggtggcacgtgccggtagtcccagccactcaggaggctgaggcacaagaatcgcttgaacccagcaggcagaggttgcagtgagccgataacccgccactgaactccagcctgggtgacagagcaggactctgtctcaaaaaaataaataaataaataaataaacccttggtctcacgcaatccttccaccttagcctcctaagtagagactacaggcgtgtaccactgtgcctggctaagctaattcaagattttgtgtgtgtgtggaaacagagtctcactttgttgcccaggctggtctcaaactcctggcctcaagcaatcctcccacctcagcctcccaaagcgctgggattacaggcatgagccaccatgcccagccattatctttttaaaaatccttccagaggctgcctgtgttcctggaatcaagtccacactccagccctgcagacctctctggcttatctcccttcccgctttcagtcccttctctttgcaggcctcattcccacttgttccctggagtaattcacacaggccttccccaccaatcctcctcctccacgcctcagcttacgggccctcctcctggagtgactgggcaggccctgctctgcgccctcgccttctcctaggctaggaccaggattcagcccagggcttcccacagccaagagcctgaggggtggggtgtgcaggaaatgcttaccctcgaggtgtagtagatccgaagcaccggattcccggacaagtcgatcatcttgtgactctcactgcctcggaccacagaacttggggagaaaacaggggaacccacaaggtttcatgaccactaccatgcatccaatcctcatgttaacacctattgtacagatggaaaactgggcacggctaaggaccagtatcctgccgaaagccacagttacctatttgggggcagagtcaggattcaaatgccacatttgaaagctcccatgccccttcctataagctgtcacctatatggaatcctagaatacccagccagaagagtcctaagaattgcttaatgcaactgtaaacatgactgaagctttaaagagaggcaggtttgcctggggtctttctacaaagcagagctaaaaaggagcccttccaggatgcctagtgccatcccagacacccttccgtctaggctcagcccaccccactgtaatgtctccaagtggcccaggcccccagaatcgcagcagacctgtggaggtgcagccagtgactggccacatccaaactcatgctgatttggaagaacagcgtggctccagggtacagcagggccaggttgaccaacaggcacatggtggagcagcggtccgtcagcatgtccagcatggccccaaaccgggttcctggaagattaggtgggcaagggctgttatggcacagtggatgcaggacaggtgcccatatttggtttatcactctgacgcagggtgtaaacgaagactggaagtgtccgcctgcctggggaggaacgcaggctagaaaacaggctgtgtgtgaggtcagtgggcaaaggtcaccatggcatgaactgagaaaggcatgagagtggagggaacagggtaggaggagaggaaagctatgtctgcaactcatcaaccccagaaccaagactccagggctagatagagacttgatgcctcaggggaagccttacagttgggtctggagaacagattaaaaaattagtcaaccctccagaagccatcacccttccctctccatcctccctctaagcatgccttctggaaccccaactgcttatgcagggcacacagtaggcctccagtaaacacctgttgaatacactgttttttgttttttgtttttttttttccgagacagagtcttgctctgtcgcccaggctggagtgcaatggcgcaatcttggctcactgcaacctccgcctcccgggttcaagcaattctcctgccttagcctcccgagtagctgggattacaggcacgcgtcaccaagcccgctaatttttgtatttttagtagagacagggtttcaccatgttggccaggctggtctcgaactcctgaactcgtgatccacccacctcggcctcccaaagtgctgggattacaggcgtgagccaccgcccctggcctgaatggacttgtattcagagagacctccagcagcgccaccgccatgtcatgtcttgctaatccacacctctcacaagcagtgagttctcaagagctagcttaaattccttttgctacaaaatcagtccattcttgctgggcgcggcactttgggagcaaggcaggaggatcgcttgaggctaggagctggggaccaatctgggcgacactgcaagacccagtctctacaaaaatttaaaaattagccgggtgtggtggcacgctcctgtagtcccagctagtcaggaggctgaggtgggaggattacttgagcccagaagatgggggctgcagtgagccatgatcgcgccactgcactccagcctaagtgacagagcgagaccctgtctcaaaaacaaaaaaacaaaacacaaaacaaaaagccccaggccatcctgttctgctttttccagagatgggaatgacagccctctgactctgaggtcccgaggaggcaggggaagggaggaggggattgttgaaccccaaggctggctgagaggggtgtctgtcaccttgattaagagcgcgagcagcgtgtccatcgaaagcgtccagcaggccgctgagcaggtagaaggaggaggccgtgagggggcagcagggcatgaagtagaaagaaatgatggcgaagacaatccgggcataaccttggaacgggacgcggggagacagggcaggatcagggagcccgccaaggcccctcgccctctcgttcggcccggggccgtgggcagcactcaccgatgaggttgggcacgaacaggaagatattttcgtctggcatcgcggcgcctcccttgctgccccgggcctgctctggagatgccagtgctgtcccagccccgcagcgcggcctcagcctccggcccggcgcatcggccgcaccacctgcgccctggaccccgccgccccaacctggccccagatgctgaagcccgcagccgtcgggagcatggaccggccccgaggtgcgcgggacgcagggggcgcgcgcagtccgcccttcctacccgcaacctccctcgcctctgccagccccgcaggcgctccgggcctccagctgcggtcgccgctgctccagctgcgcgtggcttccgggaacctcctcctccgcgcccgtcgttgcaaaattggagagaggaaaaagtggcttaaaaaaatagttgcggcccctttaaggcctgtcggcttcctttcccttttcctccctccgcccctctcccttggctcgtaccaaagcgcagaggaggagagggaggaaggaaccattaacgtcaagcaaagttagaaacggaaaaggaaagggtaaaagagaagaccgaataaaaatctctgctttccttttgtggagggtatgacttcctggaggcaaagataaggcgataaaattcctcctcctgagtctttgcgtccccaagaggccaggagatttggtgcagtcctcactttactccccgccccctaagtctccagccgcctttgctctcgcaggctctaggcggctagagaggctccagagcgccctgcagatgggttgcttttcgcgtgccccttgtgatgggaggattaggtcgcaggctccaccctacgtcatcctcccaagcttctcaagcgtctggcgcttggggtcactgccctcaaggaggcacctggaggggtacggaggggaggctggaggagcaaacggggcgcgctaggaaattcctctgtctttagttctagaacccctgatctcctagcaacgaggctgcggaacctctgcagactccaagggttttatagcgtccggtagcgacacggagccggctcccccttttccagccttcctccccatctcccattctccatcccccacgacctataccagaggtccttaggcctccacgtctctccttttgccgagtagcccaaggtttccacccatctgccaggtctggggcgtcaagtcggctgcctcggcttgggaaggtgcttgggagggaagaaggaaggagaggcccaccaggcgaaggggtgaggggtagggggttgcgggagttccctctcactcccgaagatataaagcaacctttattattattattattttttcttgtgagagggaatgaggcagcgggatgtttcctctaaaggccttgtttaaacctgggcccggggaatggtggtggactgggttctgggggaaagcgggctggtttctcaggtcaactcaggcttcgactgttcccagggggatggcgtccactccgatggggaatgagggggagaagaagagcagctggccatctcaagctgcaccctccttgagaggaggtccggtgagcactgcagggaaccctagaggtgggaatgtaatgaagtgaaagcctcccaggcagaggcaccccgtgccaggtctgagccacgggccctgagactctagcctcaaccctgagtcctgaagccccgactcatagctctcagcactaggccctgactctaaacccccaccaaacccccctcccccaggtccagagctttctagctaaatctcaaggcccagtccttcaggagcaagctccttggacccacaggccccagcctgggaactcccacagccagcactcccatgtgggagctcccaggctgaacccctccggcttttcctttcccaggcttcgttatctcgttctgaggaatacctgtcccagatcagtgcagaactcatggaggaggctttgtgcactgcttgctgccacttgaaccctgtgcccatcaaaaaaaagcagtcacaagaccaagcgactcagatatccaaacgcggtaaccccctgcctcaggaccaccgtgtctagagaaccgctgcccccactatgcctggttacagtccctgacccctcccacccctagctgaactctccaggagtctgtgcccatctcatccatctcacagccagccctaggacctgtgaaatgcccctctcacccgctaacccagtacccactcctcactgctggccgagaatccccttagccccgtctgccctggccgcatctcttctggccacggggatagtcctttctctgactaggtcctctacttccagcattcttcaccaagacctgaggcacagacacctggtgagtgaggcttcaagggagatgctctttgtcctgggagagaggtgaggaacctggaggggagagagtgagggtttcacaatatcccagcagggtgggggaatttttgaaccgtgcacttccattctattctgccctgatcctcaaattctgaattctcagccctctcccctctcttccaccatctcctgctcggacagaaaccgtacctgcagcaaggcatacctcctgccaactcctggtgaaaaggtacatgcagggtccatggctgccaaggctattcgatattaaccaaaccttttgagtttgcactatatgttggtccctgtcttaggagcttgggacactgaaatgaatggtacagtctcagcccttgaagagttcacagttcagtgtggggacagacaaggaaatggccaattataatacagtctggataagtttccataatagaaatggacacagtgggatagtactcttatcccagcttcaattggacaggaaggacaggagccatggagcttcttctttttttttttgagacggagtcttgctctgttgcccaggctggagtgcagtggtgtgatctcagctcactgcaagctccacctcctgggttcacgccattctcctgcctcagcctcccaagtagctgggactacaggcacccgccaccacacccgactaatttttttgtatttttagtagagacggggtttcaccgtgttagccaggatggtcttgatctcctgacctcatgatccgccctccttggcctcccatagtgttgggattacaggctttggagcttcttgaaggaggtagcacctaaagaaataattttccaccaggtgcagtggctcacacctgtaatcccagcatttttgggaggctgaggtgggctgatcacttcagggcaggagtttgagaccagcctggtcaacatggtgacagaggttgcagtgagctgagatcataccactgcactccagcctgggcgacagtgagaccatctcaaaaaaaaaaagaaataattttccaggttaaaaaaaaaagaggttagtaggagtctttcaagcagttggggttgcatgaacaaaggcaaagagcagtcttcgcagagccagtgtgagcatctgtgtgtatttagggcagggagaagcagtttagcagctggagtctacaggcaaggtaagaggggactcaagagactttatgtgccttgtttagagccttacacactttcctggctgggtgtggtcgcttatgcctgtaatcccagcactttgggaagctgaagcaggaggatcgcttgcgtccaggagtttgagaccagcctgggcaacatggtgataccccaggcatgatggcatgtgcctgtgatcccagttacttgggaggtgggaggatcgcttgagcccaggagttcaagaatagcctgggcaacatagagagaccccatctctataaaaagttaaaaaaattagccaggtgtggtggcacgaacctgtggtctcagctacttgagaggcggaggccagaggatcacttgagcctaggaggttgaggctgcagtgaaccatgttcatgccaccgcattccagcctgagtgacagtgcaagaccctgtctcaaaaagaaaaatttaaaaaaaagaaaagaaagaaagaaatagtaggaggagctgggtgcggtggctcatacctgtaatcccagcactttgggaggccaaggcgggtggatcatgaggtcaggagttcaagatcagcctggccaacatagtgaaaccttgtcttaactaaaaatacaaacgttaggtcaggcgcggtggctcacacctgtaatctcagcactttgggaggcccaggcgggcagatcacctgaggtcaggagtttgagaccagcctggccaacatggggaaaccctgtctctactaaaaatacaaaaattagctgggttggtggtatgcacctctaatcccagctactcaggaggctgaggcaggagaatcgcttgaacccaggagttggaggttgcagtgagccgagatcacaccactgcactccagcctgggctgcagagcaagactctttctcaaaaaaaaaaaaaaaaaaaaaagccaggcattgtgtcacgcacctgtaatcccagctacttgagaagctgaggcagagacttgattgaacccgggaggtggaggttgcagtgagctgagattgcaccactgcactccagcctgggccacagatcgagactctgtctccaaaaaattaaataaataaaaattaagcacttactatgtgccagcactgctcgaggggctggggtgttgcagtgaacgaaacagagttcctgctatcaagaggtttaaaaaattagccgggtatggtggtgcacagctgtggtcccagctactcgggaggctgaggtgggaggatcattggagcccaggttgaggctgcaggaagatatgattacaccactgcactctagcctggctgacagagggagacctgtctcgagaaaaataaaaaagacatgagccttgggtctaaagagtgaaaaggctctgtctcttttatggagctcttcctaacagtcagtttggaagatgagcccacccctctttgatgctcttggcttctcatgcctccccctttttgtccctagaacatgcctcaaaactactcttttgccactcgttaaccacttccgtttgtggggacctcctggtcatgagcagcatcatcccgaagccttcaaagtgttctggattcatcacaggaccctccagcctcagccagcaaggataccaccaggaatgaaagtgctttaataaagagacagggtgtgcattgctcatgtgtggtttctctggggtagagaagcaggacgggggggcttttatttttttttctagatgtgggtgctggatgtgggcatacgattggagtgtttagtctttaaaaaaatttttttgtggccaggcacggtggcttacgcctgtaatcccagcacagatcatgagctgaggatatcaagaccatcctggccaacacggtgaaaccctgtctgtactaaaaatacaaaaaattagccgggcatggtggcacgtgcctgtagtccgagctactcgggagggaggctgtggcaggagaatcacttgaacctgggaggcggaggttgcagtgagctgagatcgcaccactgcactccagcctgggcgacagaacgagactccgtctcaaaatttttttgtgtgtgtggagacggtgtctcactgtgttgcccagactagtcttgaactcctggcctcaaatgatcctcctgcctcggcttcccaaagtgctgggattactggtgtgaaccaccacacccggcctgttgacacagatgagctcatgggtccaaatccagcctcctggccacacgccagcaccttaaggtctaggtctgtggcatctggcaggactcctcttgcttctgaggagccacctctgccaccaccattggggatggggacactgagctatggccttgcccctctgagctttgggcttcatgcctgtgagaacatatcacactcattactagccagaaagcagtgcagtaggctttgcagtaggctaaattcattttagcatttagcatttgcattgctaaatgcaaactgcacaaagtttggccatttattggagcctcctgtggaagtcaattctcatctctgagccttagtttccttatctgaaaaaatggattaataaatgatccctgtcccgtagggtcctttagagagttaaaagacataattgagtcaggcatggtggctcatgcctgtaatcccagagacacaccggacagtatggcgggaggatcgcttgaggacaggagttcaagaccagtttgggtaacagagtgaacccccacccctaaaaaggtaaacaagttagccaggtgtggtggagcacatctgtagtcccagctgctcaggaggctaaggctggaggatcacttgagcccaggaggttgaggctgcagtgaactatgatggtgccactgtactccagcctacactacagagacaccgtctctaaagaaaaaaacataggccgggcgtggtgactcatgcctgtaatcccagcacttgggaggctgaggcgggtggatcacttgaggtcaggagttcgagaccagcctagccaacatagtgaaaccccgtctctaataaaataaaaaaattaaccgggtgtggtggcaggctcctgtaatcccagttactggggaggctgaggcaggagaatcacttgaacccagtaggcagaggttgcaatgagctgagattgcaccactacactccagcctgggtgacagagtaagactcagtcgcaaaaaaaaaaaaaaaaaaaaaagacaaaaaaacaacataatgcatacaaagtgcttgctattattgagatcagtttgcctcacattctcctaaaagtccacccctttctgaatatttcagcatcctttcaagtatcctaaaaatgtttaattgcatttaaatataaaattttattttatttgggacggagtctggctctgtcgcccaggctggagtgcagtggcgcaatctcggctcactgccagctccgcctcctgggttcacgccattctcctgcctcagcctcccaagtagctgggattacaggcgcccgccactacgcccagctaattttttgtatttttagtagagaagggatttcaccatgttagccaggatggtctcgatctcctgacctcgtaatccgcccgcctcggcctcccaaagtgctgggattacaggcgtgagccaccatgcccggcttaaatataaaattttaattaggccaggcaaggtggctcacacctgtaatcccagcactttgggaggcccaggcaggcagatcacctgaggtcaggagttcgagaccagcctggccaacatggcaaaacccggtctctactaaaaatacaaaaattaaccaggcatgggtgcctgtaatcctagctactcgaaaggctgaggcaggagaatggcttgaacccaggaggtggaggttgcagtgagccaagatcacgccattgtactgcagcctgagtgacaagagtgaaaaaaaaaaaaaaaaaagataaagtggaaaaggacacccccaaggatataaaacaagttcaaattggtagatgggtcacagcagatacgcctaaaatactaaaaagattgggggggggggaagaaatggtgtacttgaatggatacaaaaattctccaaagggggtgaattttaggcaaactggtcataagacaaattgaaaagccaggcttggtggctcacgcctgtaatcccagaactttgggaagttgaggaaggaggattgcttgaggccaggtgttcgagaccagcccgggcagcgtaacaagatctcatttctacaaaaaatttaaaaattaggcaggcaccatggcttgcacctgtagtcccagctactcaggatgctgaggcgggaggatcccttgaacctaggagtttgaggttgcagtgagctgtgatggcaccactgcattccagcctggccggcagagccaggccctgtctctaaaaagaaagaaattgaaagctgtttgcctcctgcccagcagcgagagaagacgggtggctcctgtcagttctctcccatctggaagaggcccacaatgtcaaggaaggcctggtggagaggtcactgcgtcctggagtgaggctggtcgcagggaggccttcacagaggctgagcctaaagccaggcttttttacctcaggccaggcccccggacactgccctctgcccactttcgcatttcctttttttttttttttttcaaattgttcccctttccccagccctctctccagagaagtggtccagtgctcggtgaccacctccccacactccaccggcccaattacaagtggcgattttctgtttattgctcaaaaacaagaattcagaagcaaaggtggagagactgtgggttggggagatggcaggaagggggcaaggccttgtcccagctctcccctttgtccttcttctgaccctcctggccggagtcaggcctagggccagggcatctgggaggggggcaccttcgtggccaagggaacagtagagctatcgggggcagtccttgaggggtgccctgggcaggaggggctgcaagatttgcagggaggcagagttcccctcccagaatccaaaagccggtagggcggggggcaggcccctcgtttggcaactgagaagaggcggctttgggcggcaggatgctggtttatttactgtaggatctccagggccatcaaagccccctcgtgggatagggagactatttacacagccagggaggagggcagccaggaggcagagaccgggtcccgtatttccctctgcccgaatgaggaggggaggggcgtcctgggtcctgcagctgtagtcttggggttcagatggaaacttcatactcccgcgtatcctgaagacagagagatcaggtcagttgttggagtctgataggggtggaagaggcagccgaatgggaggaggggcaacgatcctgggttttaaagtaacattgacctctaggggctggggggccagtgaatgtgtttggttcatcctacggtgtcgtaaaatgacacaaaaatctgaatttctggcttgtcttgaataattggaagatctgccaattgtgcctcagtttcgactatggggtagagccgtattcttgagatggggcacaagtcctccacttagccacagtcctcaccactccctattgtatacacatggcttgctatgctcattgacatggcctctgggggcagctgagtttgaaattcccaagacagagattccagagaccttgcgagaaggttatggagtcctgggagagccaagtggtggctcttcaggggcaggcaaggtgcttaccccagcttcatacagcgggttgctgaagtccgactccacggtgatggggctgtaggagtgggagcccgagaagccgaaaagggactttccctgaagcctgggaaagggagaggacagaggagcttatcaacaggtaagcccctgagctcccctgacccaggctccagtgccaggctcgcaagacgtctgccctggccggcagtccccaagcaggctacttacttggtgtagtagatgtaaacgccactgccgaggacaatgaccaagcctagaggcagcaggatggccagggccaggttccccccttccagctgccgtgatggatctgtggtctgggtcactacaggaggaggagaggccggtgagctgtggctgggcccggtcctgggctctcccagcctcctgccctgggcctcaaaccctgggcttcatccctccaaggcctggcctcctgccccagcctctgccttgccctcccaacctggccagcctgggtctccacctgtgctctcactgaccttccagttttcggttgtccaggagctcctcataggcaactgcagggagaggagggggaggggatggggtctgagccagggaggggaggaggctgggaggggccgggagcccggtggggctgggctggacagcctggttctctctgccctctgctcaacctcaactttctccctttgtggggaagagagaggagtgaccagcacagggcctttgtcctctttctccagacccctaaaaagtcagggttcctggacagtctgagccaaactagaacttgtcagcgatagggaaactgaggcctattcagagcaagggacttccaagccaaggccccctctactacacccctgagccaatcccatgacctcacacgacccagggcttctggacacacccgtgaggacacgaggccacaggaggagaaccgggagctctgtggggtcgcccattggtctcaaatgtgctacctgactctcccagccctgtcacttcccggacactggtgtgcccctcctgccctgtctggccaggcacctttgcagagtgggggctggctggtccactgggaggggtggccgggcacacaggtgatggtgacctcgccgataagctcaaagccctcatagcagaagaagcgcagagactcgcccgcctggtagtggtgcttgtacagcgtctggtagccattctcgggaacccccgggttcaggcacggctcgtacttcactgcggggagcatgccagtcacgtgccagctgcactactgtgcacggggcagacgggctctcccagggctacccagccaccctcccagggtgtgccccagactcacaggcgcatttggggaccctatcgctccacttgggtgtgcctgtgtcccggctgtagcaggtgagcatggctgccccctcgaggctgtaccctggcaggcagcggtactggacgtgggagccaacggggaagccggcgtccgaggcggtgcggtgcccgttggcaatctcgccagggtcagcacaagtcatgactggtggcagaagaacaaggtcagggggagcgagggccttcaaagatcagcctgggcaacacagagagaccccatctctacaaaaaattgaaaaattagccaggagtggtggcgcactcctgtggttccagctactcaggagttggaggcgggatgatcgctcgaacccagcaggtcgaggctgcagtgaatggtgaccacgctactgcactccagcctgggtgacagagtgagacccagtctaaaaaaaataaaagaaaatctcccagaagcttagggctgggagaggcctgagcctcaggctgtttcctctgaacacctctgcacacacacgcacttcccaccaattcctcagaaggaagagagcatgaattggaaaaacttaaaatgcagtgcatctattttcaggccagaatgacaggcttaatttttttcaaaattcaacgtatgttatatttcaggcttcgtttagtaaacagtttgcttggggaaaccccaagcccctatcctggggtgaaattcaaaatatttaaccaccataccagagcatactagccaaatcccagcagggtgagcccaacatggcttgtagtctgtggaacagcagctgccctctttagagggggcccagctctcctgtccccagtattctcattatgcccagcccagttcactcacatacactccctgccttcaggcgtttgagtttacaaccctgttgtgaaggaatcataatcatagccatttcttgtatataagcctgagctacgtaccctgctaaatgttttacaaacaaatataattctttgtgtgtgtgcttgttttttttttttttttttttttttttttttttttttttgagatgggagtctcgctctgtcgcccaggctggagtgcagtggcgcatctcggctcactgcaacctctgccttctggactcaagagattctcctgcctcagcctcccgagtagctgcgattacaggcattcgctaccatgcccagctaatttttgtatttttagtatagacagggtttcgccatgttggccaggctggtctcgaactcctgacctcaggtgatccacccacctcagcctccaccagtgctgggattacaggtgtgagccaccacggctggccccaaatataattctttgttttggagacgagaacttgctctgtcactcaagctggaatgcagtggtgagatcacggctcactgcagcctcaaactcctgggcttaagcaattctcgcaccacagccttctgagtagctgggactacaggcatataccaccatgcctggctatattttttattatttgtagagacagggtctcactatgttgcccaggctgttctcaatctcctgggctcaagtgatcctcccaccttggccttccaaagcactgcaatttcagatgtgagccaccacacctggcacaaacataatatttaatcctgattatcctgagaggccaatgtcactgtcatctcccttggagcccagggctcagggcggtcaaaggacttggcccatggtcattcagccagggagtggcagagccggaatctgcccagggtcacagccatggagcactggacagggactcagatatgtgggtcctggcacaccttcaggctcaatctgctgccttgggcaggttccctcctgagcccgaggcagcggggccagccgaactctcagccccatccaggcctgatatcctgtgaatccttccaggggcgggaagctttgtccagcccaaatctggctacctgaagcttctccccttggtcccaccattgcttccagatgccacatggaactacagccccatgtccttggggctggcttcctaaaatttggagaaagtaaccagctgccattcctttctgctcttcaattttctttttctttctttctttctttcttttttttttttttgagatggagtatcactcccgtggcgcaggatggaatgcaatggcacaatctcagcttactgcaacctccacctcccaggttcaagcgattctccttcctcagcctcctgagtatctgggattacaggcgtatgccaccatgcccagatagttttttatttttagtagagacggggtttcaccatgttggccaggctggtctcgaactccagacctcaggtgatccaccgcacctggccctttctgctcttctaaaagatacacactcccagctcctttaaatgtcacctcctctgtgaaatctcctgccccagccctgagaaaattagcccactgctctccccacagcacttcgccacgcccagggcagcatgcgccctgtgaactttccatctgctcttcacaacctcagtcctacttcgccgatggggaaaccaagcctcagaaatgctaagtgcctcgcccaaagtcacccagtgatcaccaccctgcgtatccctcccagactgcgagctccataagagtatggaggggcttgaacccccttcgcctaaccccaacccagcacggggcttcaatgatggcattcaaataaaccaagtgctctgacaagccttggtcctagcaaagtggctccctacaatttcaactgataggactgcgggattggggcggggcgtaggacaggaaggtggagccaagtgtggacccggggagcccagtgggaacctggtcggagcccttttaggggccaaactcagatgccgcagaggaggggtcaggaggggacggggcggggccgtgagacgaggaaacagggaccgagcccaggtcggtgcaagaaagagggatgcagcccggagaagatgagagggagacccagaggggacagtttcggggaaccgggcggaggagtgagaactaaagggcatgggggcaggccttgaagaagatccaggaaggaccccgagcgaagggatggaacccagaaagcacgggggtcgggacaggacaggccgacgacggggcccacagggaaggggcggggccgaggggacgcgggcggggccggctcactcttttggcaggcgggcggcgcggcgctccaagacaggtcccactggcaagtgagaatgtcggagcctagcagctcgtagccaggctcgcactggtaggtgagcaccgtgccccggatcaggtccccgtgggatgccgttctccagccccactccggaggtggcagctcggggcacgtgtcgttcctcgggacctctgcaggggagggaaggcgagtttggaggctgcgttttaactgcgggctcccttccagcctcggaggctttgctctgtgccccctcccgggatctgtctctctctctctctcttagagacagggtttcctgtcgcccaggctggagtacagtggtacaagcatagctcactgcagcctcaacctcctggcttcaaacgatcctcccgcctcggcctcccaaggccccgggataacaggcgtgagccaccacgaccggccacctcccgggatctctggcctgcccgacccctgcccatcccgggactctatccctcagtacctttgaagtgcaatacgaagccctggcccaggcctggatttgggggcccgggcggtgcctgaaactgcagtgtgaggtcgggcccagaggagagaaggcggcggcgcggctgaggtccccgcagctgggccaagactcgggcgctgggaccgtccccgtcgaacagcgtcagcatgtccccttcccgcacattcaatctgcagggggtgagaccaggcaatggggcggggctgcgactggcccctcccatccagctctgccccatcctcaactctgctcattggtagcccctcctactctccagccccgcccatattctcctatcccaggtctggcgccgcctccgttttgaccaaccatggtttctcctatgctagtgcctcagggttcccctattctatggctcctcccatgtcctactacccaatccctaagcttgcacattactaactccgcccactgtccactccctcctccatcaccatgagatccacagcctagcccaactccagctctggccaatcacagaccaaattcgctaacgccctacacaactctaggccccgcctgagtacctgctttgaagccacgcccacttcagcttctgtgccatctcatgacactctcataccaattcagctcactggattctccccagacctccccaacttgctggtgttaacgcaacagtttgggtctgtgtccgtggaaatagctccaggggaagcctcagaaacctccaaagagtgagaggcaccaggccagagccccttgttcacagtggcccctaaggaaggctgcattgccctatttatttgtccgaggttgcctggctaatatgtgatttgagcccagctctctcacgtctatcctgtacccttagtgcaccagcctatccaccgaattctggatagatacgcaagagccagacaggctcagaatgcaggctactgcattggcataccacactttgctgagcctacacccgtcgcaccctctgcaggacccaaacatacatctcaacttggagcaagatgcgcttctcttcctggacgtgcacgccccacacgcagtcttggcccgggctatagctctggggccagtcgggagagaggaccacgccagctggttccgacagctcccctccacacatggctagggaaaaaggggtgtcaggttcaggacccaggtgggcatgctgtcttcatttctccacagtcctcaccactcgtgatgcgtgcaccacatcacctcgcttgtttcctattacctatgatccacctgtttcttttattcttttattttatttatttatttatttttaaattttttttgagacggagtctctctgtcgcccaggctggagtgcagtggtgcgatcttggttcactgcaagctctgcctccctggttcacgccattctcctgcctcagcctcccgagtagctgggactacaggcgccgccaccacaccctatttttttttcttttttctttttttttttttttgtatttttagtagagacggggttttacggtgttagccagaatggtctcgatctcctgacctcgtgatctgcccgccttggcctcccaaagtgctgggattacaggcgtgagccaccaggtccagcccctatttttatttttttagacagagtctcactctgtcgcccaggctggagtgcagtggcgcaatcccggctcactgcaatctccacctcgcagactcaagcgattctcgtgcctcagcctcccaagtagctgggattacaggcacgcactaccatgcccggctaatttttgtatttttagtagagacggggtttcactctattgaccaggctggtctccaactcctgacctcaggtgatccgcctgcctgagcctcccagagtgttgggattacaggcgtgagacactgctcccggctttatccacctgtttcttttttctttctttctttcttttttgagacggagtttcacacttcttgcccaggctggagtgcagtgctgcgatctcggctcaccgcaacctccgcctcccgggttcaagcgattctcctgcctcagcctcctgagtagctgggattacaggcatgcatcaccatgcccagctaattttgtattttaagtagagacagggtttctccatgttgatcaggctggtctcgaactcccgacctcaggtgatccgcccgcctcagcctcccatagtgctggtattacaggcgtgagccaccgtgcccagccatgatctacctgtttcttgccgcatctaggtcctgttgtgttcaatatccagtcctgctcttaacaaaccctgcccactctccagcctgcccaatctgtgacttaacccaacagcagttctcgctcttgaagacatttgggtttgtgacccctgcattcagtaacaagcccagcagttattcagctaagaaaacagcctctgaagggacagggatttacccaaggcttgggtggatgaagtctggatgtgcagccttcctttctgaacggccttgctgggatccccagttcagggggcaacgtggactgaaggacatgcctgcgacaaggaaggctcacctttgcaggccggctctgtgtcgttccagtggggttctgtgggatccacacattcgatggcattggggggcccagggggctccagggcatatcctgggaggcacgagaaggttgccagtgcccctgggcgatactcagggtccgtggtagtgacatttccatgtgccaggaagggggcgaagcagcgatcctcctcaaaggctgggaaggagtcagtcataacaattaagcattaggacaggcctcaagggatcttaaattggggatgtgggctgaattggggtgttctttggccactcactgggcttttttttttttttaaacagtcttgtgctgtcgcccaggctggagtgcagtggtacaaccttggctcactgcagcctctgacttccaggttcaagcaattctcatgcctcagcctcccaggtagctgggattgcaggcgtgcaccaccatgcccagctattttttttttttttgagatggaatttcacacttgttgcccaggctggagtgcaatggcacaatcttggctcaccgcaacctccgcctcctgggttcaagcgattctcctgcctcctgagtagctgggattataggcatgtgctactacgcctggctaattttttgtatttttagtagagacggggtttctccaggttgatcaggctggtctcaaactcccgacctcaggtgatctgcctgcctcggcctcccaaagtgctgggattacaggcatgagccaccgtgcctggccaatttttgtattcttagtagagacaggggtttcaccatgtcggctaggctggtcttgaactcctggcctcgagtgatctgcctgcctcagcctcccaaaatgctgggattacagacatgagtcactgcgcccagcctgggtttttttttaatttttttagagacagggtctcactctgttgcccaggctggagtgcagtggtgtgatcacagctcattgcagcctagatcttctaggctcaagtgatcctcccacctcagcctctctggtagctgggactacaagcatgcacaccccacccagcagctcattttctgattttttttttttttctgtagagatggagtttcaccatgttacttaggctggtctcgaactcctgacctcaggtgatccgctggcctcggcctcccaaagtgctgggattacaggtatgagccattgccctggcgttggtgggtttttaaaaactgaatgccactgggtttagcattcactctccagactgtcaaaaaaagttctaacactcctcattcacatatttatattgcctccctggcctctggagggaagccactgagctagccaaatcccagccaccattctacagagcggaggtccatagaccaaaaagccacttgctcaaggtcacacaaaagacaatggcaaaagcaggtctcaaacccagatggtttgattcccagccacagatacttggctctggaaacagcagagatagcgggtaaggggaggggtgccttcagagaactggctggtgtaggtgtattgtctcctcagaaataacagttggattctgatcatccatgctgttgctgaaacccaaaatttcagctaatgcaaaaactactcagtttttacttcaagtcagcaaaagtgaacatttgtagagcatttgagtttctgcccacctgatcggatcttagctgcaaaactccctgtaagttaagatttaggtgcctatgataccaatgaggaattcttttttttttttttttttttttttgggatggagtttcgctcttgttgcccaggctggagtgcaatggtgtgatctcggctcactgcaacctctgcctcccaggttcaagtgattctcctgcctcagcctcccgagtagctgggattacaggcacccacaaccacccccggctaatttttgtatttttttagtagagatggggttttaccatgttggccaggctggtctcgaacacctgacctcaggtgatccacccgcctcagcctcccaaagtgctgggattataggcgtgagccaccatacccggccttttttttttttttttgagatttttaattttattttaatattttatttttttattttttgagactgagtctcgctctgtcgcccaggctggagtgcagtggcatgatctcacttcactgcaaactcggcttcccaggttcaagccattctcatgtctcagcctcctgagtagctgggattacaggcacgtactaccacacctggctaatttctgtgtttttagtagaaatggggctttgccatgttgcctaggctggtttcaaactcctgggctcaagtgatccacctgcctcagcctcccaaaatgcggagattacaggcatgagccactgtgcccgggttattttatttatttttaaaaatgaggccagatgcagtggctcacacctgtaatccccccactttgggaggctgaggcaggtgaatcacctgaggtcaggagtttgagaccagcctgaccaccatggtgaaactccgtctctactaaaaacacaaaaattagctgggcgtggtggtacatgcctgtaatcccagctactcagaaggctgaggcaggagaaccacttgaacccggaaggcggaggttgcagtgagccgagattgcgccattgcactccagcctgggtgacaagagcgaaactccatctcaaaaaaaaaaaaaaaaggaaaaaaatgagacagggccttgctctgtcacctaggctggagcgtgcaatggtgggatcacaactcacagcagccttgacctcctgagctcaagcgatcctcctgcctcagcctcccaagcagctgggaccacaagtgtgcaccaccacacctggctaattttttgttttgttttgttttgtagagacaaaggtcttgctatgttgcccaggctggtctccaactcccaggctcaagtgatcctcccatcttaacctcccaaagtgctgggattacaggcgttagccattgtgcctggccacagtgaagaatcttaaactcatagaatagcagtggcctacaactctggagtcaggactcacaacttgctattttcggtaaaagatctgtgctgtttgcactttaacactcccagaatctatcccgcaattcatttttgcagatccactgttctatttcactgttacttaacctgcaaggtatcatgtccaaatcctacccatccatcacagccgagtgccaattccatttctcccatgattcatatcaaacactagaccctcctatctctaagcatttcatctttttggtctctctcttgctactgtttatacaactcctctgtttcagccacaatgaaattctgtttcccagacataccaggcatttccctacttgctgtttctcaaagttcctctctttccttttcttttcttttcttctttttttttgacagggtcttgctctgttgcccaggctggagcacagtggtgcaatcatagctcactgcaacctctggggttcaagtggggttcaagtgatcctcccacctcaaccttccatgtagctgggactagaggtgtgtgccaccacacctggataattattacttttttttaatttgtagacacaggatctcactatgttgctcagactggttctcaaactcctggcctcaaacaatcatcccaccttggcctcccaaagtactgggattagagacacgagtcaccacaactggcctcaatcttcctcttttaaaatatcctctgttggctgggcagggtggctcacgcctgtaatcctagcactttgagaggccgaggtgggaggatcacttcagctcagtagttggagaccagcctgggcaacatagtgagatgctgtctctacaaaaaatgtaaaaattacccaggcatggtgccgaacgcttgtggtcccagctactagggaggctgaggcaggaggatcacttgagcccaggaggttgaggttgcagtgaaccatgatcgggccaccgcactacggcctgggcgacaaagcaagacctatttcaataataataataataataataaaataccctctatcctttaaggccaaggtgaaatgcctcttcctccatgatcacttccttgtttctaccccttcacattcattcctcttcttctggtaacggcatcccaattttaattttgggacgcaggccttccccactcccagtccactaggttaagttggagcccaccagggaaggccacgtgaggcagattagccaatcccaatactcccttctcctagctcagtgattggctcaggctaaggccaaccaggatcttagtcaggtcaatgaacgcctctcctggcatttttgctgagctctcaggaaatatatgagtgttctctctgatgaggttactcggttggtggtatgggctggaggaggtggcttacacctgtaatcctggcactttgggagtcccacatgggcgaatcacttgagcccaggagttcaagaccagcctgggcaacatggtgaaaccccgtctctactaaaaacccaaaaattagctgggcgtggtgatgcatgcctgtaatcccagctactcgggaggctaaggaatgagaatcgcttgaacctggaggaggggggctgcagtgagctgagatcgcgccactgcactccagcctgggcgacagagaggaactctgtctcaaaataaataaataaataaaaataaataaaaactaaaaactgtcaggcgcagtggctcacgcctgtaatcccaacactttgggaggcggaggcgggcagatcacctgagttcgggagttccagaccagcctgaccaacgtggagaaaccccatttttactaaaaatacaaaattagctgggcatggtggcgcatgcctgtaatcccagctactcgggaggctgaggcaggaaaatcgcttgaacccgggaggcagaggttgcggtgagccgagatcatgacattgcaccccagcctgggcaacaagagcaaaactccgtctcaaaataaataaaggccgggcgcggtggctcactcctgtaatcccagcactttgggcggccgaggcaggcggatcacaaggtcaggagatcgagtccatcttggctaacacggtgaaaccccgtctctactaaaaatacaaaaaaattagtcgggcgcggtggcgggtgcctgtagccccagctactcgggaggctgaggcaggagaatggcgtgaacccggaaggcggagcttgcagtgagccaagatggcgccactgcattccagcctgggtgacagagcgagactcgtctcaaaaaataaataaataaataaataaaataaaaattaagttggtggtatgtaagtcggcagctatgtccatcacacagggaaagtgcctaaggatgaagccagcacagaggaaagaaccgagatactgagataactggtctctgggctatgtacctggatccagacattcatgaagcttaaacagagaaggctgcctgggggaaggagaaggggtccctagaagagatccttgcagttttggggcagggaagcgagtcacgtttcaaggaacccagcacggagatgaacaggcatagagtttgtgcttccgactatgcttggtgtcaggaagaggggaaggtgtggcggttggggtcctgtgggggagtgggtcacttaccttcaaatcgaaggcttaacagcaggggattggcaggtgtctctgacagcagctccacgtagagggactgggcgtcactgatgagaccccgctcggggacatcgtccatgtccgaatcatagatcacgggggatagggggctgccccctgagcgcaccatcagcctgggatggacagaaacgtgaccaggagctcaatctccctcacaagctgcctcaccccttgcctgctttcctaacttatttttatagctgttatcatcacacataactatatgccacgcactcttctaagcccttacacattctatctcatttaattttcacaagaactcttgagtcagacactattattatcctttattttatagatgaggatattagggcatagaaagatcaagtaacctgtccaaggtcacagagcaagtagtggcagggctgagataccaagttgctaggtaaaggatgataatgatgatgaagatagcagatgcttgaccaggcatggtggctcagctcacacctgtcatcccagcactttgggaagccaagacgggtggatcacctgaagtcaaggagttcaagaccaggctggccaacatggtaaaaccccatgtttactaaaaatacaaaaattagccaggcatggtggtgcatgcctataatcccagctactcaggaggctgaggcaggagaattgcttgcatctgggaggtggaggttgcagtgagctgaatccgtgccactgcactccagcctgggtgacagagcgaaagtctgtctccaaaaataaataaatagataaataaggccaggtgcagtggttcatgcctgtaatcctagcactttgggaggctgaggtgggtggatcacgaggtcaggagatcgagaccatcctggctaacacggtgaaaccccaactctactaaaaaaaaaagtacaaaaaattagccggacgtggtggcacacgcttgtagtcccagctactcgggaggctaaggcaggagaatagcttgagcctgggagacagaggttgtagtgagccgagatcgcaccactgcactccagcctgggcgacagggtgagactccatcttaaaaaaaaaaaaaaaagaggatagcagacacttttatagtgcttattgtcccaggtgccattctaaggactttatataatttcagcacttatcctcacagaaacctgaagagggaagtattgttatctccattctacagatgaggaaactgaggcacaaagaagttaagtgatttgtctaaggtttcacagctacacttcctaagaaagtcttaggactggctgggtgtggtggctcacgcctataattccagcactttgggaggccaaggtgggcagatcacctgaggttgggagtttgagaccagcctgaccaacatggagaaactccatctctactaaaaatgcaaaattagctgggcatggtggtgcatgcctgtaatcccaactaatcaggaggctgaggcaggagaatcacttgaacccgggaggcagaggttgcggtaagccaagactgcggcactgcactccagcctgggcaacaagagtgaaactctgtctcaaaaaaagaaaaaaaaaaaaaaaaaggcttaggactaagctgtgatgcatatctcaaccaggatccaccccagctgtgtccaagtccccacttagcctccctacttccctgaggtggggacttctttttttttttttgagacggagtctcattctgtctcccaggatggagtgcagtggtgcgatcttggctcactgcaagctctgcctcccgggttcacgccattctcctgcctcagcctcccgagtagctgggactacaggtgcccaccaccatgcccggctaattttttttttttttttttgtatttttagtagagatggggtttcaccgtgttagccaggatggactcgatctcctgaccttgtgatccgcctgcttcggcctcccaaagtactgggattacaggcatgagccaccatgcccggccaaggtggggacttctgacccaagacccagacccttaccggtcattgtcctcatccagcgagaccctttcaaagtgcaggtgcagccggcgcccctcagctgcttcaatgacccaacggcaggtgaggttgggccctacggctcccccaggctctggggacacgatgcggcccagggtggcattgtggatggtgccaccacaggatgctgtgggcagaggaggggtacgttaaggccagcctgaggtgaactgtccttctcctcggggcctcggcccgttttcagaactgttgcattcacacatttggctgggacccggcccagggctggcctctgtcccatggagtcactccagaggatgggaccttctccaggcatgagccaggaaagaaaccagccccggtacgggagaaccccaggattgacacctcctaggatggagacaccactaaaatgaagactctccaactgcggatactctaggatggggagttacaaggatccctaaaattcaaagcctcagctgggaaatcttcaggacaggactttcagagtgaagacaccacgggatgggaatcccagtaagaggctctctaggatagaagccctctggacatgaaccctaaaaatggcttcctctaggatgaggacgctaccccagaagggacctccagaatggtgactcccaaaataaaatctccagtgggacaccccgagatggagaccacccaaggatggagaaaccccaaggagagagaccctccgcacaaagagctctggctgcagaccccaggatggggactcctcagggtaaacaccccttcagaatgggttttccccaaaggtggacacctggacacccccgagataggaccctcccaatggggttcccagaacagatgccccacccactgtggcaggagactcacccatgcagctgggggtttcaccgttccaggatggccgggtgccattgaggcagatgagggtctcctctccctgcagctggtagcccgaatcacagtgaaaggtggcagtgcccccagggtgcaggtccgtcacactcacgtccccatgggccggccggggagggaagccacagctcaggaggtaggctgcaccagacagacagcgggtagcagggctcactttcccatgccaccctctcatactgatcccccagcacttcccccctctcctttcaggccaaccttccaggggcacacactggctccatactggcgtacataccgagaaataagagctcctcacacaggcaccttgcctcgcgaacaggaaactccaacaccccttatctcccccactcattgtaattcaccctcgttggcccccattttatagatgaggtatctgaggttcaaacaagttattctggaccccgctactcatttgttgtgtgacttcaggcaaatcaatgaactactctgaacttcatccagctgtaataacagtatttgcagagcttgttcagctcccaaagtgagtccacacagagattttgaggtcagcagacaaagattatgtgacctggctaggcatgctggctcacgcctgtaatcccagcacttttggaggccgaggcaggtggatcacgaagtcaggagttcgagaccagcctggccaacatggtaaaaccccgtctctaaaaaatacgaaaattagccaggcgtggtggtgggtgcctgtaatcccagctacttggtaggctgaggcaggagaatcacttgaacccaggaggcagaggttgcagtgagccgagatcgtcccattgcactccagcctgggcgacaagagcaaaactctgtctcaaaaaaaaaaagattatgtgacctgttttgcaggtgtgaacactgaggctccaagttattaaatgtctcttttgatttttcttccctccacacacacagcctttcttccaccaaggtgccctgtggtataccctcagctcctcagcttccatccagaagaaccacttgaaacttctttttttttttttttttttttttttttttttgagatagggtctcactgtgttgcccaggctggagtgcagtggtgtgatcatagctcactggaaccttgaactcctggcctcaagcaatcctcctgacccagcctcccaagtagctgggactacaggtttgtgccaccatgccccgctaatttttaaattttttgtagagatgacatctcagtatgttgcccaggctggtcttgaactcctggcctcaagcaaacatgaaacttgttgaggaaatttgactattttgtctttttgtttttgtttttgtttttgaggagaagtctcactctgttgcccaggctggagtgcattggcgcaatctcggctcactgcaacctccgtctcccgggttcaagcggttctcctgcctcagcctcccaagtagctgggattacaggtgtgtgcgaccatgcctagctaatttttgtatttttagtagagatgggattttaccatgttggccagggtggtctcgaactcctgatctcttcagacctcctgacttcactttcactgggggattcatttacaggccactgagtattaagatctttaaagacaaaatagtctttaaaggcacagtggctcacgcctgtaatcctggcactttgggaggctgaggcgggcggatcacctgaggtcaggaaaaagacccaggccttgtcctcaggagtccattgtctactgagatgaacataagaacaaccttctagaacaaagtggtttcaataaatggtagctttgggaatggctgcccatgcccaacagaatcaagtctgaatgctttagtttgacattcaagccccttccatagttaaatgcagcccagcacattccaggttcagggttgatctcccaagaccgatatagcctacacaacacagttttgtgactccttaattttccacctccatattttcgcttgtgctctccccctactttctcatcttttaagagatcagactggggggcttatgtaccacctcttccaggaagccttcctgactctacatctctccaacagttacttgttctcttacctgtacacagtcctgcatgcatgattttgtcatcacattaaccattgtctttttttttttttttttttttttttgagagggtctcactctgtcacccagtctggagtgcagtggcttgatctcagctcattgcaacttttacctcccgggttcaagtaattctcctccctcagcctcccaagtagctgggattataggcgtgtgccacgactcctggctaattttggtatttttattattatttattttattattattattttttgagacggagtattgctctgtcacccaggctggagtgcagtgacacgatcttggctcactgcaacctccgtctcccaggttcaagcaattctccggcctcagcctcctgagtagctgggattacaggcatgtgccaccatgcccagctaatttctgtatttttagtagagacggtgtttcaccatgttggtcaggctggtctcgaactcctgacctcgtgatctgcccgcctcggcctcccaaagtgctgtgattacaggcgtgaaccactgtgctggtattttcagtacagacagtgtttcactatgttggccaggctggtcttgaactcctgacctcaggtgatccacctaccttggcctcccaaagtgctgggattacaggcgtgagccaccatacctggcctaaccactgtctacactggcccaagccttatttattttgtgtcctaaaaggctagtctatgaggtcaggagttccagaccagcctggccaatatggtgaaaccctgtctctaataaaaatacaaaaaattagctgggcatggtggcacacgcctataatcccagctactcaggaggctgagacaggagaatcgcttgaaccaagggggcggaggttgcagggagctgagattgtgccattgcactccagcctgggcagcagagtgagactccgtctcaaaaaaaaaaaagggctagcctggctgatcaatgggtgcagccaagaggcagcatggatcggtgcaaagaccactggatttgtcatcaggcagacctgagttccagttctagctccagaacttactaactacatgcctttgagcaggtgacttcatctctaggggcctctcacctattaacggcaataataattcctatcagggaagattggcctgaaaattaaataaaagaaacacgcaaagcacctggcacatagaagctgctgagaaaacgttaatcacccacccctcagcctcaattaatgaatgactgggagccagggactcggggatctgttgtctggctgcaataaacgtgcagatggttgagcaatctacataacctttgagtcttttccttcctttgagagatagaactgacaatggccactctcagggtttctgtgagaagcaaatgaaactaaggttggtgaaagggctttgtaatgggaaagtttgctgaacttggggtgaggggtgaaggagactttggcttttcagagaaactaatgaggccactctggaccagaggccccagctagtgcaggttgggaagggctgaaacagggccttggtcccaaaggtacccagtgcagctgcgaagcagggaagactgagcaatgaaggccaatttgtgcaatagtcctgcttccccaaatgttccacttagcctaaggagtcctattttcagtgccctggggaagtggctgcttaaaggagccagtggggagccatatcttcagatttcacaatatctgaaatccagcacttggcccaggccctccaggaatgctcttgctccccaataaccaggtccctactgccaaatacacgtcccccagcttgctggcccccgatgaataggcacctttgctatgcacacatgagcccctaaggcaggtcctgagcagaggcctcaaaagaggctggagaggacatgagaataggattcagggtgtaccctgcatgaggcacacaaggcatctgcggtcagcagagctttcaaggagggcagagtgcgtgacaccagccaaggccatgcggtgatgtgaagggggcattggcccgacacacagttctctctgtctccatgaagcataggaagacagtggggtctggaacagggcactggctgggcccctttcctcatgcacacatgtctgctagaacacacccttgtactgtgggaaggttcccgcacacacaggtaagcatggatgtacacacatgtgcaggtcatctgtcataggtcctaacaaatgcagtcgtgcgtgaatacagcccccctttcctgcccccagaagtcagaaggatctttaaattgcaaatctgaggctttcactttcctgcttaaaacatttcaggccaggcaccatggctcacgcctgtaatctcagcactttgggaggtcaaggcaggaggatttcctgaggtcgggagttcgagaccagcctgaccaacatggagaaaccccgtctctactaaaaatacaaagttagccgggagtggtggggcatgcttgtaatcccagctactcaggaggctgaggcaggagaatcgcttgaacccgggaggcagaggctgcggtgagccaagattgcgccattgcattccagcctggccaacaagagcaaaactccatctcaaataaataaataaataaataaataaaattcaaattaggaggcctggcgtggtggctcatgcctgtaatcccagcactttgggaggccaaggcgggtggatcacttgaggtcaggagttcgagaccagcctggccaacatggtgaaaccccatctctactaaaaatacaaaaattagccaggcgtagtggcaggtgcctgtaatcccagatactggggaggctgagacaggagaatcatctgaagctaggaggcagaggttgcagtgagctgaggtcatcaccactgcactccagcctgggcaacaaagtgagactctgtctcaaaaaaaaaaaaaaaaaaattcaaatatctgcctgtcacacctgcaggttgaagtagtctggactgcttactgaagcagataaggctctttatggtctgaatctgacctgcctcccagcctggtctctggcccatttccccttcacccgcttctgtgctttgaaagtaatagcagtgactgacagttttgagctctcactgtgtaccacacgctgtttgtgtttttgtttgtttgtttttgagacagagtttcacttttgtcacctagcctggagtacaatggcgcaatctcagctcaatgcaacctccgcctcctgggttcaaacaattctcttgcctcagcctcccaagtaactgggattacaggtgcttgccaccatgcctggctaatttttgtaattttagtagagatggggtttcaccatgttggccaggcaggtcttgaactcctgacctcaggtgatccaccagccttggcctcccaaagtgctgagattataggcgtgagccaccacgccaggccacacactgttttaaacacttgacatgtattaattcatttgatcttccccataatactaagtattgtgatccctatttttcagatgagatcatgaggcacagaaaagttaagtaacttgtcccaggtcacacagctaggacaattctatcttccatgctgaattccttcacctcatctgggggtcatgtcttctctctctgggtcttggagtgtgctttttcatccacttagccatctgcctccctccttctctccctccctcccaccctttccctggcgaatttatccttcaggtctcagcttagtcatcatctcctccaagaagatgtccccatattccttgggagaaatttaggtcccttggctatgtgctgcccccgctggtgtttctgccatcatattccttatctccttgaattataaccatcctgattactcatctgtcttcctacctagattctgagctcgttgaagccagatttacacctggtttgttcattcctccttcaaggctaacacagggcctggtatgaagcaagcacttgataaacatttgttggattcaatggatgaattgtccctcggatgtgtgcacagatctgtgagtgtgtgagataagtatgcatgggtctcctctgagggccctgccccccagggtcgcagtcaggaggaaaagcccccttcggcaccctgtgcttcgatggttcttaaagatgtcccctctataggccgggcacagtggctcttgcctgtaatcccagcactttgggaggctgaggcaggtggatcacaaagtcaggagatcgagaccatcctggctaacgcggtgaaatcccatctctactaaaaatacaaaaaattagctgggcatggtggcgggcgtctgtagtcccagctacttgagaggctgaggcaggagaatggcgtgaacctgggaggcagagcttgcagtgagctgagatcacgccactgacctccagtctgggcgacagagcaagactctgtctcaaaaaaaaaaaaaaaaaaaaagatgtccagtgtatgcagtatggcccctgcccttccagcagcaccctcaaactcctcaccctgatagtggatcctgaagccaccgccccttgggacccgtgggctctggaagtgcagaagcagccggttggttgggctccgaaggacttgtccttctccaagcatggatgagttggccaggagtcggggggccaggcctggggatcccccaccagccagcaccaggagctcctcttcctgtgacaggttcagcgtctgcacctagagaagccagacacagacccgccagggcaagtcagccaggtgtttgacttccaaagcccctgtcctgtgcctttgccctgtgtgtagcagcccaaaaggcaccacgctgctgcccaagttgtagaaatctagaagagtttttgaggtcacctgagtcatcagacaggttctttggctcccaggccaaacccgtgcacacccacagcccagaggaaaaggcttggaagctgcacagtcacatgctttggtccagttacctggatctcaatgccgtagccagggtagacatggatgctgtaagtgcagtccaggagccccagggtgcggctgacggggctccccagatctggagactccacatacccttcgccctcggagatgttgttattacacagaactgaggagatacaaatggctgggatggaaggaatgcctgtgcttttgccctcccagccaagcaactctggccttcatctcccttctccttagcacttctcatcatctttttgttttgtttgagacagggtctcgctctgtcacccaggctggagtgcagtggtgcaatcatggctcactgcagtctcaaattcctgggctcaagtgatcctccctcctcagcctcccgagtagctgggcccacaggtgcacatcaccatggtgagacaatttttaaaactttttgtagaaatggggtcttgccacatttcccaggctggactcaaactcctggcctcaagcgatcctcctgccttggcctcccaaatcactgggattacagctgtgcgctgctgtgcccccctcaccatcttttatttttttatttttatttttttaagatggagttttgctcttgttgcctaggctagagtgcaatggctggatctcagctcaccacaacctccacctcccgggttcaagcaattctcctgcctcagccttctgagtagctgggattacaggcatgcgccaccacgcctggctaattttgtatttttagtagagacagggtttctccatgttgctcaggctggtctcgaactcccgacctcaggtgatctgcccgcctggcctcccaaagtgctgggattacaggctagagccaccatgtccatcactatctttaagcaatgctccctctcccacctgagccagaactccctttcccaactgttatatagctgaaacaattggaacactgcctggtacatagtaagggtacagaaatgctacctttgttattattattctcccatctgtacccaggactccttccacagttcccagcagcctctctcccatccatccccagcgtgtacctctccggtcctcccacccccatccccttgctgtcgcctcacctgggctggtcaccgtagtggtaacagttgtcgtggtgatgatggtggtcgtcgtctcctcctctcctccctcaggcccaaggggaggccctggggaggcagggctgggtgggggtggggctgtggttcctgggggcggggtcagcagttctggcgcagtggggcctgcccccctgaccccgttaggggtgacggctgttgtcagaggccctgtccccggctcagtggcccgtggcagggagggcactgcgagagtctggccggccggaggggtggctagcgtggggtcccgatcagatcctgggacagtgcagggaatatcagagcacaggaggagcacatggaggaccttgggtggggagcagggctgagggaagctaggggttcccctgccataccacaaaagcctcccgcacaaggtacagcaccccccacctttcccttccccaccccagcccctacctcctcccaaggcttccacagcctgagtcccccctctttctcttctggtcccttctctccacccagccccttccaccctgatactcctctccctgagcctctctctctgcctcctcactcagatcacgttctctctctggttatctcctctctcctctgtctcattctctctcgaactctttatttccccatttccctgtttagtattctgattgcactctgatttcatgattcgagatccactagtttttgtgtttcattctctctgtctctgtcttccaccatttctctgagtctggttctctgaatttccatctctgtttctatgtgtctgtttttctgtctgactgtcacctaatcattctgtctctgtctctctggttctgtctgtgcccaggtttgactttctctgacagtctcgttctgtgttccctgaatctcacaggaatgcaggctctttcctctgcagtctctctctgcctgctcttctctagcctggctccccatctccctgagcccatatccctccctctgcctctaggccactcctgccactctgggggcctcacctggcaggtagcccatctctgggcccctcctcagcagggccccatgaagcagttcagccagggcctcagaggccaccgtgggggtctcacttccaggctctggcaatatctcctcctccttcaggggcagacctaggaggtgaagttgtgtgagcttctccacttccccacaccccttccttctccagagagatattttctagaactcttcctccctcctccatcagctgggcctgcaggggctcagatggtcccaggctcgactgagggccaagatcggaggaggggctcccagctgccctcatactcccactcccacacctcttctctcccctcccctctcccttctccctgggctgtgtgggccttcattgaacaccttagctcttatggaccctggacagcgccagcaaggcagaggggtcgccggtgctgccttccctttcacctcagtggtgatctccccccaaccctggggctctgcagaggatctggccgcacctcccagcccttgcttccgcagtgcctggctttctctctgggtttctgtctctgcagtgtggctgtcttttctctctctctctctctctctctcccccccaccctctctctctctggtcctctgcagtctctgcctccttccctggagtctggctgggggtcagagtgggggactgaaaatctggtctttgagccctgcctctgctcatctgtctttgtccattcatccaagaacagttgtgtgtacagcgcctggcatctctctcagcacctccatctcccacccaggtccctccatgcttctgccgcctccgcagacatccccccaactttcccagccctccttcttggatctagcccctgagacactgctaaaagcttctctcattcatttctctgccttctcaatattgagggttaaggggcttcgggttcaagcctgaaagctctggcttgccccttccccatcagctgtgcctctcccctcccccatgtgctcggaagacccaggatattaagagaaaggagggtggaggaccccgctggacgccttcctggggcccacccccacagtctcatgtccttaccctggatccagggacagctcagcagaattaggaacagcagctggggaggcggcgggtgctgggccctgggagtccccatggcgactcaccccgatctctctcctctgtgcctctctaagtaatctggctgccacctttcctccgtctccgtttatctttccctttaattgttttttttttttttttttttttcctcgtaggagtcagcaaagaaagacaatttctctgccccttgggatggaggggcagaattgggctaggggtcgcctggagcccacccccctttgctcagtctcctctgtcctcttctcgcggctctgtggtggagggggcgcggctccggctgcagggggtggggccgagagggccgaaggggccgggtggcctgggttaccctcctgctcaggcgcctgggtccactgggctgtctggaccccaagctaggggactggggaggagaaagacagcttctgggggtttagggtggggtcgaggatcgagggggtctccactgggctctagcggggcttgtcggggaggggaaggggtgggttggggaactgggagagccgaagctcgggcactggagctgcgggagggagaagctgagaaaggtatcgagcccacgtcagatcctggggacgggcggagggaggggcctgggatttatttgacggggagggaggaggaggaagtgcagatggaggagggagggatcatacgagccagggccgtaatcctcactcccgcggcccctaggggaggcaaaggaaactctctggtcccagcagtaattagccccctccgcctgccattccagcacatctggaatctgaatctcctcttcccagggtgccgaggggctgcatagcttggttcgcgcctgctaggcccccaattatgccccctgttcacattcagacctcccaaggggcttcccttccccttttacagtagctcgggtggaatgggctctccctcctccaggggaatagagagcttccacgattgtgacaagtctcgtgggtgacgggccggggtttggggaggagagacagacccctcctcttccataaaccctgaccccggccagctaacaggcggcctcggctctgattttccctccggagcgcccttttcagcaccagcggcgcgcggacagctcccctcgccccgccggggcgggcccggcccgacgccgcccgcgattggctgaggccgctttcggtgtttgccaggctcgcgggctcccgggctgcctagggccagcgggagtcacaggccgaccgaccgacggaccagccgcccgacggactggcctcagcatccttgcccgcagtcccgggcgcctgcccagccgtcagtccgcgctcgccccgcccctcaggccccgcccctcaggccccgcccgatacgacccgccccttctttcgcattgcgggacggctggaggctggcaccgtggcccctgcgccccacgtggcgccctttccgggcggggggggtggggaggcacctccagcgacaactctcccccctcccccggcacccggctgatttgctgtgccactgggagggttcgggggtggctgagctgagagggctccgggaaggagtgacgtcagggtgagtgggagcccaggaaggagcgagtaggagagagggagcgagagccaggcaggaccgcagggtcggggctagtgaggagcgagggcaaggagagagcagtgaggccggagagaaagaagctgccgcggaggaagacaggctgcgggttcccgggactgcaggtccaggcagggtaggaaccgctgcccaggggagctaggaggaagcggggagagagagcgagcgaaaagcgggggtggggaggaaagggggagattgaggtgggagagagaagcagagcgagagagaggaggctgctggaaggagaaagaagagggtgaggaggcgacagagggagaggaggaagaagaggtagaaggagagagaaaggggagagaaaggagagaggagggttggaggtgcatgaaggaggggagagggagcttcagcgtggagagaggaccgcggaaggagagagagacagcccagagtggaatgtggaagggaaacagtccagcggggagccagggggcagccatggaagggacaggtggggagctggggggacaggggaactggggtccggaggacgccccaggcctcttggccagggcctccctgatcatgctcccgtggccactacccctggcctcctcggccctcaccttgctcttcggggccctcacttccctgttcctctggtactgctaccgcctgggctcccaagacatgcaggccctaggggctgggagccgagctgggggtgttcgtggtgggcctgtgggatgctcggaggccggcgggccaagcccagggggtcctggggatcccggggaaggacctaggacggaaggcctagtgagccggcggcttcgggcctacgcaaggcgctactcctgggctgggatgggtagagtgaggcgggcagctcagggtggcccaggccctgggagagggccaggggtcctaggtattcagcgcccaggcctgcttttcctaccagacctgccttcagccccctttgtgccgcgggacgcccagcggcacgacgtggagctcctggagagcagcttccctgccattttgcgggacttcggggctgtgagctgggacttctcagggactacccctccgcctcggggctggtccccacctctggcccccgggtgctaccagctcctgctgtaccaagcaggccggtgccaacccagcaactgccgccggtgcccgggggcctatcgggcactgagggggcttcgaagctttatgagtgccaacaccttcggcaatgccggcttttccgttctcctgcctggggcccggctcgagggccgctgtgggcccaccaatgcccgggtcagatgccatctgggtaagtagctgccgcctactgacaacctccttgcctcgatgatttcccccccagacccttctctccgccagagccgtctgctgtctggttctcattgtgcctctcttcttccatggctccctgttgccacccacagcagcatttcctcagcctcggttatctgcacaccaccttcataagctttgccgtggtcattcccatctgtactgcgtttcttcaccttggctctccccccgaccttttgttctacgtatttaaaagaaatatttatagcactatcagtattacttgccctaaatagtactcataaaaagcctggacaacacagtgagaccttgtctctacaaataataaaacaattagccgggcgcggtggcccatgcctatggtcccagctactggagagggtgaggtgggaggttcactggagctcagcagtttgaggctgcagtgagctgagattgtgctactgcactccagcctgggtgacaagaaagtactcataaacacaagctgaaatttaaaaaagaaagctttcaacagtctagaacattctagttaagtgctctagtctctctgatcctgaagcctacacttttttcttttttgaggagtctcgctctgtcgcccaggcgagagtgcagtggcacgatcttggctcactgcaagctccacctcccgggttcataccattctcctgcctcagcctcccgagtatctgggactacaggcacctgccactacacctggctaatttttttttattttgtatttttagtgaagacagggtttcaccatgttagccaggatggtctccatctcctgacctcgtgatcaatccgcctcggcctcccaaagtgctgggattacaggcatgagccaccgtgcctagccctacaccttcttttttaaaagggttggtggggtgtcaaagttacagtagcaccaaactgagattttttctttttcttttttttttttttttgagacagggtctcactctgtcacccaggctggagtgcagtggcacaaacatggctcactacagccttaacctcctgagatcaaaggatcctctcacctcagcctcctgagtagctgggaccacaggtgcccaccaccatgcttggctgattttttaaaaatttacgtaggccaggcgcggtggctcacgcctgtaatcccagcactttgggaggctgaggcaggcggatcacctgaggctgggagttcgagaccagctgaccaacatggagaaatcctgtctctactaaaattacagaaaattagctgggtgtggtgtcgcatgcctgtaatcccagctactcgggaggccgaggcaggagaatcacttgaactcgggaggcggaggttgcagtgagccgagatcacaacattgcactccagcctgggcaacaagagcgaaacttcatctcaaaaacaagaaaaaaaaattgtgtaaagacaggctggacctgaactcctgaactcaagtgatcctcctgccttggcctcccaaagtgctgagattacaggcgtgagccaccgcacctggcactttttgatgtcttaaagactggaagaaaatggaaaaggaaataattttctgttattccatgccatgaccttgttttgcccccaatcatctcctgtgctgccagctggatgtgtcctacacttcagggcacactagcctcaggatcagttcccaatccttcctctcttccctctctctgtgctctaaatcatgaaaaccttctggccaatcctgacagatgccacatgtgctgttcttttcaacctagaatccccttcccccgtaccacctcctgaaaaactcctactcagccttcagtactcaagttttcaagtgccacacttcctctgggttggcttcctgttcccccatcagttgagttggctgctcactttcctcacagcactcagccatgtggtccttgggccaggaacgtctttaatcttatacctctcagtgagacagcgcctatcacacagtaagctcttgagtcaaactgtcgaaagcccaggaggaaaagccatttcctccaggaagccttctcttttctcgaaatgagaggttgctgccaggtgccgtggctcatccctgaaataccagcactttgggaggccaaagcaggaggattgcttgaggccaggagttcaagaccagcactgtctgtataagaataaaataaaataaaataaaataaaataacgggtctggccaggtgcagtggctcacacctgtaatcccagcattttgggaggctgaggtaggcagatcacttgagctcaggggttcgagaccagcctggccaacatggcgaaaccccatctctactaaaaatacaaaaattagccaggcgtggtggcaggcagctgtaatcctagctactcgggaggctgaggcaggagaattgcttgaacctgggaggcggaggttgcagtgagccaagatcatgccactgcactccaacctggcgacagagcaagactacatctcaaaaaaaaaaacaaaacaaaaaattaaccctgcattgtagcacatgcctgtaatcccagcagctactcaggaggctgagacacgagaatcacttgaacctgggaagcagagtgagctgagatcacaccactccactccagcctgggtgagagagtgagactttgtctcaaaaaaaaaaaaaaaaaaaagatgggtcacactacccacagcagcgtttccctaatctcctagcacttccctcctccaggactgtattgtaattatactgtggccactttctggaaagaaaggaggatgaccacaaaacctggcatttaagacacttagagctagttgctaattgactggccaggatgggcccctgggatggaggcaggagtgctggatgcccgcgtctcttcttacaggcctaaagatccctcctggctgtgagctggtggtcggcggtgagccccagtgctgggctgaggggcactgtctactggtggacgactcttttctacacacagtggctcacaatggtaacggggtgcccattctgcaggggggatgagggactcaggagcaaaggagcgttgactagaaggcagcagaatcaggcccaacggacttcctgtcctaccaccaccatcttccagctgcatgaccttgaacaagccgcataacttctccaatgccctaggaccaccaccttcttcatcaagtaactgcaaggattaaatgagataatattacgtacacagaaaagcggttaccagcacaggactctgggttcctgtcctacctcttgcacttgggcaaaggacttaacctccttatgcctctgttgctttgtataaaatagggataattatggtaataccacagtttgttttgatgattaagagttgatacatatcggccgggcatggtggctcacgcctgtaatcccagcactttgggaggctgaggtgggcggatcacctgaggccaggagttcgagaccagcctggccaacatggtgaaaccccgtctctattaaacatacaaagaaattacccaggtgtggtgatgagcacctgaaatcccagctactagggagactgaggcaggagaattgcttgaacctgggaggccaaggttgcagtgagccgaaattgcgccactgcactccagcctggtgacagagcaagactccatctcaggaaaaaaaaaaaaaaaaaaaaaaaagatttgatacatttaaagggttagaacaaggcctgccacttatttactgtttgcttttatggtgtttggtgagtgctctggtgtgcaagtacctaatgtcagtggctctgctgttcctgtcccatgtgccctaggctcccccgaagatgggcctcgagtggtcttcatcgtggacctctggcaccccaacgtggcaggggctgagcgccaggccctcgactttgtcttcgccccagacccttgaaggaaggtgctcccttcacacacccaggctggagagacactgcgctcagggacggcttgatggtagccaggacctcctctctactgcgggggtgggcgggggcggaggatgggaactggctagtgagcactgaaatataaattctgaatcctctcctaactcccgactacttccttcgcagggagaggctggggcagggccttatgtcttctcctagtacaaccaaacaggtacctccttttttttctttcttttttttttttttttgtagagtcagggtcttgctttgttgcccaggctggtcttgaactcctgggctcaagtgatccttctgcctcaacctcctgagtagttgggattacacgtgtgagccaccacgcccggccagatacctcctaacacaggcatctccccgtccctctccccaggagccagcaccagtttctcaacttaactttatttcaataatttaatagaaaattaaaataataaataatatgaaacagactgataacgctgagctgggcaggcccaggccagtctagtacaaagttaaggaggtagggaggatggtggggaggagggggcggactaccctgcaggacgcgggaggctgctcagactgtggtgatgtcaggaagggccgcacactttggcatggacgatgcactaaaaaaagagaaagggaattctaaatccctcttaaccagctggagagggaaggacgcagggccagggtggggacaagtgttggcttcggaaggctctgagtggtggggccggaatgtaccatgttgttagcaatggggttgggatgggtggagaagggccaaagtgagctgtgccatgcaatgaagggacagaggaggacccacgacttggccagcagagccggggcaaaagtctgggaaggggagggaaagagagagggactgggtcccaaggcaagaggaaggcagggggagggtcagaggtcagtccttgaagacaatttgttggccatgaggacgctcgtcgtgggtgatatggcgccggacatggatcctgcggacacggtgctctcggttctcttcatcctccccgcggccagccccaccagctccagctgctccccctgtggcctccaggagggctgggtctgggccccggggagtctcgtagatgaggatgttcagggtctcctcgaagatccgggcctctggaaattccacctgcaaaaggccagccggccccagctccttccttctggtgcagtcacgcagggccatccccctgcctagggcccctgcaccaacacacctcctagccctgcagtcaggtccttgggcctggcctggcctctctgccactcctttactcagcaaagtcatacttcaaggctcagctctgaagtcaggcaggcagaattatttgttttctctccttcatctccttccctgcctagcctcttggtatattttttcatttgacaaatactgagtgagtgcactgcaccaggtattgttctaggcactgcaaaaatagcagtgaacaaaacaagagttctgtcctcaggaggttacattctagtgggaggactcagtcatacacttaagaaaatataaactagcctggcgcagtgactcaggcctgtaatcccagcactttgggaggccaaggtgggaggacagcttgaggccaggagtttgagtctagtctgggcaacatggtgtaaccccatctctaccaaaaatacaaaaaattagctaggtgtggtggcccacacctgtgttcccagctactcgggagactgaggtgggaggatcacctgagcatgggaggtggaggttgcagtgagccaagattgtaccactgcactccaacctgggtgacagtgagaccccatctcaaaataaataaataaataaataaaataaaatataaatgcagtcaaatgatgatgtttaggaaacgatataagctgggtgtggtgtctcctgactgtaatcccagcacattgggaggctaaggcaggaacatcgttagagcccaggagttcaagttcaaagccagcctgggcaatgtagcaagacctcatctattaaaaaaaaaaaaagagagagagagagaaagagatacatcaggaaaagagatacatcaggaaaaggggatgtgatagccagagccaggagtgttacaactttaagaaggactccagggaaggcctcactgagaaggtgatatttgaccaaaggagtgggggaggggacaaggcacacagagcagaaagagcagcctggggagggccagggccagcgtgagagctgtgggtcaggagtgcacccagtgtcttactggaagatcaaaagggaggccaatgcaattgaggcagagatgagagggaatggaaagggatgaagtcgaagaggtgactggggtgttcccttgtgtggccttggaagcatctaacacagctcttagcaaactgtttttttaattttttatttttattttttattttttcctgagacagagtcttgctctgtcacccaggctggagcgcaatggcacaatctcagctcactgcaacctccacttcccaagttcaagcgattttcctgcttcaacctcccggagtagctgggattacaggcatgtgccattatgcccagctaatttttggatttttagtagagacagggtttcaccatgttgtacaggctggtctcgaactcctgacctcgtgatctgcccgcctcagcctcccaaagtgctgggattacaggtgtgagccaccatgcccggccttttttttttttttttaatcgttgtttgtttgtttctaagacaagatctcactctgttgcctaggctggagtgcagtggtgtgatcatgtatccctgcagcctcaacctcccgggctcaagtgatcctcccacctcagcttcctgagtacctgggtgtaccactatgtccagttaatttttttttattttttgtagagatggggtcttgctgtgttgcccaggctggcctcaaactcctggccttaatggtcccctgcctcagcctcctaaagtattgggattacaggtgtgagccatgcactctaattattggtttatcttcctatcttcccaatcagaggatgtttcttggaagctgggtcactgattcattcattcattcattcaataaatgtttcctagcttccactgtgtgaaaagggcccagctaatgggagataggaaagaaaaagacatggccctgccctcaaggaactaacacctcgctgctgatgcaaaccccctcccctccaccacacatgataaaacactgtctttagctatgaagggagtgtgaccaactttggggttgctggattgaaagttcatgagtgaaggtgacccaaagaaagtgatgcttagcttgagtcttaagattaagtacaagttcattaggcagatagaaggaaagaattccaagaggcaacagtgtgtgcagaggtaagaggtaagaaatagcactgagtgcttagagacttgtgatgactgtggtgtacctgaggcatgtggctcatagtaagctcggaagggaccagatgaggaagggcttgtattttgctcagcacttcattccccttgatttccagcccggtacagtacttagcacagagcaggggcttggggaatatcttgatgattgccacattaatgactcaggatctacaaactcagaggatgttctaagagacatctgattctgaggttttaagaatctatttttggcaatgggcctttctgagtttcccttttttttttttttaattagagttagggctcactctgtctcctaggatggagtgcagtggcatgatcatagctccctgctgcctcaaattcctgggctagggcgggcccggtggctcacacctataatccaagcactttgggaggccgaggagggcagatcacttgaggtcaggggttcaataccagcctgaccaacatggcgaagtctctactaaagagacttctctactacatttagtctctactaaaaaatacaaaaattagccgggcatggaggcgggtgcctgtagtgccagctacttgggaggctgaggcaggagaatcacttgaatctgggaggcagaggttaagtgagctgagatcacaccattgcactgcagcttgggcaacagagtgagactctgtctaaaaaaaaaaaaaaaaaaataggctgggggcagtggctcacgcttgtaatcccagcactttgggaggctgaggtgggtggatcacgaggtcaagagattgagaccatcctggccaacatggtgaaaccccgtttctactaaaaatacaaaaattagctgggcatggtggcacgtgcctgtagtcctagctactggggaggctgaggcagaagaatcgcttgaacctgggaggtagaggttgcggtgagcggagattgtgccactgcactacagcctggtgacacaacgagactccatctcaaataataataataataataataaataaataaattactgggctcaagcaatcctcctgccttagcttcctgagtagctgggattacaggtgcatgccatcatgtcaccaagccaccacacctggctaaattttttgacttcttacagagatcaggtcccacgatgttgcccaggctggtctcgaactcctgggctcaagtgatcctcctgccttggcctcccagagtcctggggttacaggcgtaagccactatgcctcaccccttctgagtttctaatggcaactatggaccccctatacagaaaaatgcatacacccccatttcaggagttgcaaacagccttgaaacccatccaacaggcctaggctaagcaccctgctctaacccgtgacccccatttcacagagaaacagagacccacagggatagggtggcttgcccactgttgtgcaccccagaccccaggatctggctcctgcctcctggtggtgggctccttcccctgccaacctgcttttgtccagggtcctggtcctggccacccccagcccccaacataggctctggagcccctctgaccttggtctgcttcttctccgtagcatagacaatggaggtgcagcacacctcggcgattttgcggccctgcccgtagaaagaccagcagcagatctcgtcccccaggacatccttgaggaagagtagccgcccgtggaagcgcagggccagcttgtcgaacagctcgatgttcttaagtaggttgtcatctgaagtgctggggaccaggggaccaggaggcctcagcgcagttggcacccctccctctgtacccccagaagacgggcctggatgcattcccagtcctctgctcctgcccagggctttggtgctcaacagagagcctcctccacccctggggccaggctaaacgggtctcagaagggaagccacatgcgctgagcaaatcccagcacagcacagcacagcagctccagtgagggaccgggagccaggccacctccccgggggtcctggtgtccccattttttaactgggtgacactaggcaagttacttcacctcttggtgtcccgacctcctcatctgtaaaatggagctcacaacagtactgacctcaagggggaggactctgccagttcctagaatgagagcacttgggataggctcgccactatcactttgtcctcacccaaacccatttactgatgactgagctgaagctgagaagcagaaaggacctgcctagagcgtcaggggtaagaggcgaagccgaatctgcgagcaggcacagatgttcttgtaggccccccgtgtggccgtggccctcgccttgggcagaagcagggctgtgctgcatcccagggtcccgcccagtgccccgcaccccggcggtcacctggtgtaggagtacttgttgttactgcggttgtgcaggagcttcaccacgggctggcgggggagagaggatggacgagaggggtgaggctgcagggagaggcccccccagtgagcctccaccctgcagggcttgggggcctcaccttggaggtgctggccaggagctgctgctcctcccggggagatgtcaccatggggatgaggcacagcggggacagcgtctcccttttttgctggggaagaagcggaaggtggttaacagcacaaccaaaggccacgtactcccccacttaaaagccttcaaaagctggttgggaacaactccagactcctcagtggtccgcagggctctgcaggctccaagctccgccagcctctctgccactctccctttgcttgctgggccttggtcccacggacaccttgctgcttcacacatccagcttgtgcctgccccggccactggctgtgcccctgcccgggatgcttctttgctcagctgtcagcgtggcgtgtccgtcatgccattcagatcgcaggtcacacagtgcctcctcagggccagccctccccagcccccctggctaaaacagcctcctctacatcctgccttttgtgttatcagttttctttttctttttttgagacagagtttcgcttgttgcccaggctggagtgcaatggcgccatctcggctcactgcaacctccacctcccgggttaaagcaattctcctgcctcagcctcctgagtagctgggattacaggcatgtgccaccacacccagctaattttgtatttttagtagagacgaggtttctccatgttggtcaggctggtcatgaactcccgaactcaggtgatcagcccgcctcagcctcccaaagtgctgggattacaggcgtgagccactgcaccaggcctatcagttcattttctacacagcagttagtgtctgactttttctaactttttgtatttgtttatgatctgtctcttcccacctaggaataactacctagtatacagctgatgctctgtatttgttgaatgaatgaacatatttgttgagtgaatgaacttcattgggtgggatgacgttggagaaagaaatctgaagcaaacccatgggcttctttctcttctgtcttctagaatcttcatgccaaaatccctctcacttctcccaaccttgaaaactcaatgcgcaattctaatacaaattccagatttgttttttgcagaaactcataagactctctaaaattaacagagaataataaaagtctacaattactgaggccattttttttttttttttttttttgagacagggtcttgctgtcatccaggctgagtgcagtggcatgaccacagcttacagcagccttgacctcctgggctcaagccatcctcccaaacttaggtcagtttttaaaaataagagcaaagaggaaaggccgaccctgccagatattaagataggctgcaaagccacaacagtgagaacggtatcagttcgggcacagaaacaaaaatacctgagaaacacaacagagcgatcagaaacagaccactgtgtatatgagaattggtatttttaaaaagacaccacaaatgtgcgaggggaattacggagtatgaattcgttatctatcactgtgtaacaaactgcccccaatttaggagcttaaattaacaatatttattacttctgtttctgagggtcaggatctcagcagtggctcggctgggtggctccggcacagggtctcttctgaggctgtggccaagatgtcagtggggctgtgggcatcaaaggcatgaccgcccctagaggatgcactctgagaaagcttgttcatgtggctggcaagttcgcactagctgctggcaggaaacaacaaatccctgccatgtagatctctccacagggttgcttgagtatcctcgcagcatggcaactggcttctccagagcaaataattccagagagggcaaggtggaagcctcattgtcttttttatttttgagatggagtctcactgtgtcgcccaggctggagtgcagtggcgtaatatcggctcactgcaacctccgcctcccaggttcaagtgattttcctgcctcaaccacccaagtagctgggattaccgaggtgtgccatcacgcccagctaatttttgtatttttagtagagacagggtttcaccatgttggccaggctggtctcaaactcccgacctcaggtgatccactcgcctcagcctcccaaagtgctgggattacagacgtgagccacagcgccgggcccctccattgtcttttatgacctaggtctgttggtcctatccagtgaggaaggagatgacacacaggaacgagcaccaggggacgagaatcatcaggctgccttggtggctggctccacaggccaccgctggctctcagtgatttcccccctcccacatgccaaatatactcaccaccttccaggatcccccatcatcccattacagcatcagctcaaagtacagaatctcatcatctcagtcaggtccaggtggggatgtggctctagcatgcagttccgtaactatggctccttaagtgcatttcttttttttttttttttttgaaatggagtcttgctctgtctcccaagctgaagtgcagagccaccaccatctcacctcactgaaaactctgcttcccaggttcaagtgattctcttgcctcagcatcccaagtagctgggactacaggcatgcaccaccatcccagctaattttctttagtagagacgggatttcaccatgttggccaggctcgtctttaactcctgacctcaggtgatccacttgccttggcctcccaaagtgttgggattacaggcgtgagccaccgcatccagcccttaagtgcatttcctatctgcagacctgtgagctaaagagacaggtcatctccacactcccagtgtgcagtggtagaggcaggcacaggataaccagtaaggacattcttgctcaaaagcaggggaagccgggcgtggtagcgtgtgcctgtcatcccagctactcaggaggccaaggtgggaggattacttgagcccaggagttcgagaccagcctgggcaacatagcaagactctgtctcaaaaaaaaaaaaaagtggggcaggggacaggaggcacatataagtcatacatataagtcactggtgtgtggaaattctgtaatccagttggagaaatgctaggaactctttgatgcctactcctgttcatgaatgattctccatggctctccctgagtcgtcccacctcttccatgaaagatgtttgcagctccacagtttcatctgcctgcttcctgcctgtaaaagtttgggtgtgcaaagccgtcttgtccttttgcactggctctgtccctttcagtccaagctggcagtgtctctgccaatataattctcttcataacttattgggtatcttgcatgtcttagggttcactacattagaaaaaagccacacctagaaatctctgcaagtggccaggcacagtggctcacgcctgtaatcccagcactttgggaggccgaggtgggtggatcacctgaggtcaggagtttgagactagcctgaccaacatggtgaaaccccatctctactaaaaatacaaaaattagctgggcgtggtggtgggcacctgtaatcgcagctactcaggaggctgagacaggagaatcacttgaacccaggaggaggaggttgcagtgagctatctcaaaaaaaaaaaaaagaaaagaaaaagaaaaaagaaaatctctgcaaggtaagcccttctctactttgggcttgtgctgagacgctgaaagacaacacctttaaccttctcagaagcgtgattattatttcattcgactggaagtcccctctgaggcatcttgttggtatttctgaggtcttaacaaaggactttttcatcacatcctcagcttgacctttagaccacatttccctgtatttaatgccttgtatttaatctttgcacggaagccatttgttaattttaacatcacttgttatctggaaaggctgggaattttcaaacccaacaatttcaggctctttttcatttaagtgttttttttctttaacttactctctcctcttcagttttactataagcagcaagaagccaggtggcaccttcaacattctgtctggaaagctccttagctagaccatccgttccttaggtatatttcctaccctccacactaatgcaggagacagtgttgctaaactttctgccgctacacaaggatctcctttccatcagtttccaatagcattttcctaactgttcttcaagcccttattgcagctgtcttaaaggtcactggactcttattaacagactttctcaccttttttcttttaatttttttagagacaaggtctcactatattgctcaggctggtctcgaactcctgaactcaagtgatcctcccaccttggcctccaaaagttatggtattacaagtgtgaaccactgtgcccagccaatactttttaacactccttaagcttttactaacaatctcctcaaagtccttccagcttcttcccacttctcagttgtaaagttacttctacatttgaggtttctgttatggcagacccccattccagaaaccaaagtctgttctctgttactgggtaacaaattactacaaactcagcagcttaaaacaacagtccaggtgtggaggctcatgcctgtaatctcagcattttgggaggccaaggctggaggactgcttgaggtcaggagttcgagaccagcctggccgacagagcaagactctgtctctatttaaaaataaataaataaaaataaacattatctcacatagtttctgtgggtcaggaatttgggatgggcttagctgggtggccctggcccagaatctgtcatgaagctgcagtctggattttggctagggctgcagtcatcagaaggtttgcctgggcctagaagctctggttctgagacaggtcaccactatggcggggagtctgtgcttgctgtcggcaggggcttcagttcctcaccaagtggacctctgcttagggatgcctgagtgtcctcacatagcattcacatagagtgagtgatctcaaagagaggcagaagctgtaatgtcttttatgacctagcttcaaagtcacatgctgtcatttctgcaatgtcctattggtcatacacaagggtctccttggtgaggatctgaaaaggtctgccctatttggtgtgggaggggactgaacaagagcctggaaaccaggaggcaagaacccctggtggctgtcttgggtgctggctacctctggactgtttaatacctggcactgggaaaactacctcaccctatggaagacaaaaatgagctaaatcccttcacaatcatatttacaaaagtgagttccatttagattaaaatacccatatatgaaaaaaatccatatttaaaactataggtcaggtatagcggatcacacctgtaatcccagcactttgggaggccgaagtgggcagatcgcttgagctcaggagtttgagaccagcttgaccaacatggcaaaaccccctttctacaaaaaatacaaaaattagacgggtgtggtggctcatgcttgtaatcccagcactttgggagaccaaggcgggcggatcacgaggtcaggagttcgagaccagtctggccaacgtcgtgaaaccccatctctgctaaaatacaaaaattagccaggcatggtggtgcacgcctgtaatcccagctactcaggaggttagggcaggagaatcgcttgaacccgggaggcagaggttgcagtgagccgagatcatgccactgcactccagtctgggcaatagagtgagactccatttagaaaaataaaaaataaaaaatcagccaggtgtcatggtgcacgcctgtaatcgcagctactcgggaggctgagacatgaaaattgtttgaacctgggaggtggaggttgcagtgagccgagatgacaccattgaactctaacctgggtgacagatcaagactctgcctcaaaaaataaaaataaaactacaaagctcacaggtaacagaaaatcagaaaaacatttttaaacaagaccataaggatacagcattaggcaaaaaatggtgaggaattggactacatccaaatcaagaatttttcaagttgacaatggaaagcatgactttacaaataatctcatgtaataatgttgaagagaaaagacttataggtattctgtggcacaaatgtaattactggttcaggtaaggattatcaatttgtgtgtcattgataggtaactgccttaatacagtggccaaataccatatgcattattttatagttagcaacaaggaaatgtaacaatgatagagaaatcaaaccaccatcccctagatccaggggccaattatgaacgtcattaatgacgagtcatattaacaatattatgggttgcttgatgtggcccaacgtgaaatacatacataatattacctaaaatgtattctaaacaaaatgtttaatatcagtcattttatttattttattatttattcatttattttgagacagagtcttgctctgttgaccaggctggagtgcagtggtgcaaccttgactcactgcaacctctgcctcccaggttcatataattcttctgcctcagcctcctgagtaactgggactacaggcacccaccaccactcccagctaatttttgtaattttttatttatttatttatttatttttgagatggagtctcgcactgttgcccaggctggagtgcagtggcacgatctcggctcactgcaacctctgcctccccaggttcaagcgattctcctgcctcagcctcctgagtagctgggattacagatgcccaccaccaggcctggctaatttttttgtatttttagtagatacagggtttcaccatgttggccaggctggtcttgaactcctgaccttgtgatccacctgcctcagcctcccaaagtgctgggattacaggcatgagccaccgcacctggcataatttttgtatttttaatagagatggggtttcaccatgctgaccaggctggtctcaaactcctgacctcaagtgatccacctgccttggcctcccaaagtgctgggattataggcgtgagccaccgtgcccacccaatatcagtcatttaaaatctacagtctggtttacaggaaattaaggataaggctgggtaataaaccaaacgataccgggagtaaacaaccaggcaaagttggaaagcgggtcattgtgcaggacaactggcagtctctttaacaagccagcatcgtgaggaaaaagggaccccttggattgtaataaagtaatgcttatggtattatttggcttatgtaataaagtaatgcttatggtattatttggcttatgtaataaagtaatgcttatggtattattatggtaactgtattaaggcagttacctatcaatgataatccttacctgaaccagtaattacattcgtgccatagaatacctataactcttatcatctcttcaacattattacatgaaactatttgtaaagtcatgctttccattgttaacttgcagataaccagatgcaacgtgaagatctagactggaccctggtttgatgaaccagctgtaaaaacacatttctggaacaactggagaaaccggagtatgccctggactggatattaaataaaaatttattgacatgtaaagatggcaattattaacaacaacaaaaaacagattataaaacatttcatacaacacgattgtattttggcaagcaaatacacacacacacacatactctcacacaggaaacgacctggaagaatatttggtgcttttattttttagattatttgtgtttctgaaatttctacaattaataaatactgctttaaaataatcaatggttatttgtaattttaaaaaatcaaggatttccattcaatgctagatgccacaagtgggtgacattctaagaaaaaatattggcgatatctacattgactagaaatttttatctagaacagactttttcaactgaagttcctcatctgaatctcaaaaaccagcaaatatggccaggcacggtggctcacgcctgaatcccagcactttgggaggccaaggcaggtggatcacttgaggtcaggagttcgagaccagcctggccaacatggcgaaactccatctctaccaaaaatatgataaaattagccaggcattgtagtgcacacatgtagtcccagctacccggaaagctgaggcaggagaatcacttgaaccccagagagggaggttgcagtgaggtaagatcgcgccactgcactccaccctgggcgacagagcaagactccacctcaaaaaaagaaaaacaaaaacaaaaacaaaaaaacagcaaataatttgagtgttttctgaactttgctgagaacagtaggtaaatagtcccatgctacaggcttagaggttaatttgttatgtatataatccatgccctagggaatgtataagacatacccatatgcagtagggcttaattatccctaggaactaaactaaaatatgcaaggatctcctgctaagcaacatgaaaaagaaaaaagcagaaaatctggtaaagaacatgaataagcaattcacaggaagggaaacaaaaaaacactagtgagtatatgaaaagatgctgaacctcattagtaatcagaggcatgcaaatgaaaatgagatcacgctacactcattggattggcaaaattagaaagctggatgatgccatgtcttgatgaggacatgcagaaatgtaatctcttatgcactgctcattatgaggataaagtattataaccattcgggagagcaattagatgatatttactaaaacgccgtttgcaggtgtcctgttatccagcaattctactcccagctacaatgacaggagactggcacagaatcagaagggagcatgtaccaggatgctcatggtgacacggtttgtaggggcaggaactggaaggcaatctaggtctccaacctcaggggaatgtatgaacaaaatatggtgaatgaacaccgcagatttctctgcagctgttagaagcaaagaactagatgtacttggagcagcatgaatagatcttgaaaaaaagtgctgaattaaaaaaacacaatgcaacagaaactgattcacagcttcaatgccatttatggacatttaaaatgcacacatatgcagaacaatgctttagcttttcgagcatatgtatcaaaacattaaaattggatgggtgcccctgggaaaaaggaaagtaggcaggggactgggaatgaagggaaagaaataaaactaaaagacaaaaggtttgcatagaccaatattgatgaagtgccacacactgaggagtgtgctgagctgcgtgaggtgcagagggaacctggaaaggagagagcaggagtatagaaaagtacagctcttgggaggctgaaggtcagatagtcaggtagcctggggtcaaatctgagctctgctgcttcccagctctttcaccttggacacgtcttccaagctccctcgcgtttctttttacgtcaaacaaggatacaagatgtatacacaagcagatagcagaattgctcctgacacacagtgggtacatgatgacattagtaaatttaaaactacaggccgggttttaaaactttagttttaacattagtaaatttaaaactacaggccggtggctcacgcctgtaatcccagcactttggggggccaaggcggatggatcacgtgaggtcaggagttcgacaccagcctaacaaacatggtgaaaccccgtctctactaaaaatacaaaaaagtagcaaagcgtggtagcaggcgcctgtaattctagctacttgggaggctgaggcaggagaattgcttgaacctgggaggcagaggttgcggtgagccaagatcacgccattgcactccagcctgggcgacagagagactctgtctcaaaacaaaacaaaaatgctacagagcaggaatgcacttccaagatctagtacaatgaatgtttctcaaatgcaagtggtaatttattaatgggtcatgaaataagtaatgggtcccaaacagcattaaaaagaaagattatcagagtacatttcactaaaagtatctttttatagaactgttatttcagttatatataatgagtactaaaatgcattttttccctatggcaggcaatcaaaaagtttgaaaaacatggatattgtccaaaggagttctacacctttgggcttcaagaaccagtaagtattccctgagacaaaagttgttcagggaggcaaccttttaatctataaagggcattcaaaaagaaacttttataatcttctcttactattgtaacataaaagaaaggacatttttaacattgtaaaaatagaacagaataacaggctttatgtaaaactcactactttgtacttatttttctcccttccctgtctttcggaacccgaggacagaatcccagaggtaggaatggactcactgaaggtcactgagtcagctgtgacagaggtgacacagaacccttatgtcctggcttcactttccaagctctgctcctcagaaccctaaggggtccacaaaagtggagcctagcaggtggggtctctagaatccccaaccctgttttactgggagtggccctgcttctgtgagatttcatttgaataaagaatttcactgtttaaaaaaaaaaaagaattagaaagctcctggggggcggaagccatgggagaatgctgcctcccaggatagggccagatcgcagaggttattatatttcaatttaaatttagatgtttttccctagtgacatgagggagctatttaggatttctaagcaagagagagaatagatcggggttgtgctgaaagataattactcaggtgcgagtgtaacagctggactggctgcataggaacagtgggaagtagagagcagctatttaaccattgcaaaggtcctggcatgaggctggggtgggggtgctgcctgaggcggcagggatgcagaagatggcacctcaaattctctggggttatggccagccaaagccaggctctccaagccataccccatatctccttttttctgctctaatacctgcttgggcagctctcccaggaacataggcatggggactccgaaggccctcacctgcagcgccagctggcagtcctcaatcaggccctgcaccaggtagtagcgtgcttcgcccagcagctcccccagttctctcgtactctccggcagtggcacagacccatcccgcaggtaattgaggattgtaccaaagtgacggccgctccggtcaatcagcacccaacctagtggggtggggagaggcagggggaaagatggctttgctgcgggacctggagctactaaattaaaaaaaaatttttgtagagatggagtctcactatgttgcccaggctggtcttgaactcctgggctcaagtgatcctcccatctcggcctcccaagtacttggattataggtgtgagccaccaaacctggcctaaattataagaaaaaaggattccagccaggcgcggtggctcatgcctataatcccagcaccttaggaggctgaggcaggcagatcacctgaggtcaggagtttgagactagcaggaccaacacggagaaaccccatctctactaaaaatacaaaattagctgggcttggtggctggtgccagctactcgggggggggcgaggcaggagaatcgcttgaagccgggaggtggagtttgcagtgagccgagatcgcgccattgcactccagcctgggtaataagagggaaactccgtctcaaaacaaaaaaataaaaaaagaaaagtaaagaaaagaaggccgggcacggtgactgacgcctgtaatcccagcactttgggaggccgaggtgggcggatcacctgaggtcaagagttcgagaccagcctgaccaacatggagaaatcccgtctttactaaaaacacaaaattagccgggcatggtggcgcatgcctgtaatcccagctactcaggaggctgaggcaggagaattgcttgaatccgggaggtgggggttgcggtgagccgagatcgtgccattgcactccagcctgggcaacaagagtgaaactccatctcaaaaaaaaagaaaagaaaagaaaagaaaagaaaaaggattccaaagccacaaaaaagtctgaatactgatctgtctcaaacctgtgccacagccaagaaatctctttaaaacatctccagcgagttctcccttaagtttttatacatattcaaccagataattaactcatccatatctggtctacagtcagaaggctctcaccatgagaaagttcttgcagaattaccttatcaataaactgttaacccccgaagttaattctcaccatcctatttaattaaaatgtctacctccccccgtccagttcactgccattttaacttttatattcttcatagagcttactatcaaaaaaagaaaaaagaaagaacttactactatctgcaattgcatatgcatatacattttgtttacttgcttattggtcttctgatctcccacttccctaaaaaaagggaatttccataattttgtcaggttcatttacctatctccagcactaactgatattttacaaatacttattggacaaatgaattcttcccttttttttttttttttttgagacagtctctctctgtcgcccaggctggagtgcagtggcgctgtctcggctcactgcaacctccgcctcccaggttcaagcgattctcctgtctcagcctcccgagtagctgggctacaggcgcacaccaccacgcccggctaatttttgtatttttagtagagacggggtttcgccatattggtcaggctggtctcgaactcctgacctcaggtgatccaccgcctcggcctcccaaagtgctgggattaaaggcgtgagccaccgcacctggccgaattcttcacctttgatacttgaaggcagatctccgcctctcaaatttttattctcctgctctcacagtcctcgttaacccctcccttaagactctcccactcccaaactccaaaacttcaaagtctcacttgggcacgaagggtccatacttgaatgcaacactccaagaaggtaaggttcacctgccaaggagacctgtccaccctccactctggtgtccctggcaaacccaaagcagcctccttctgcaatgtgtgtatacaggtggattcctagagtgtacagggacctgtgtcaggggaacacagaggcaaacaagatctcccagctctcctggctggctgtgagcagttctgaagcagagagggaaacaaaaggctgggcagtcggaagaaactgaggaaggctgccaggagtagtactgcaggcagcagggctagttcccaagtcttgagctgaggggtgaagggtgggagaggtggtcatgaggattatgaactgacacgttcaatcacttaccacagcgcctggcagttaggggttccgtaagtgttggttattgctgggggtaaaggattgggggaggagaagagaaattatgaatgagaaaggggaggagatgggatgtgggggctggagggagctgagaatgagttgactggacagtagcgggcagagagaaggggcatgaggagccccggtggtgagagactgcggggaacgggagttgggggtctggggtgggggcacggtaggggcgccgctcgtacctccggcatcggtcagcacctccacgcggccgctgaacatggctttgagcatggtgtcctgtcccgtgagggtgcgcagcgtggtgtagtgcaacgagccgcccacgttcagcttcacgtatttgctgttcggggtcagcggcttgagaccgtaggcggcggggccaggctcgagacccgagggcttgggggcttccagggacggggccgcggcggcagccgggcccgaggcctccgccgacatgccgggtagcagcggcggacggcgatcccaggatctctccgcgccctgcggcctgctcccgaagaccctcggccggcccccagcccttgggccagaccgctcggcgcacacgcccactcaccgcagctactctgcaagaccggccctccgccccatctcgctcgcaccacccggaagccggcgccgggcagctgcgcaggcgcggccccgcccctgaatgggggcggggctgcgagtatggagcatgcgcagtggcctcgctgggggatcccgtagaggtttggcgtgtggcctgcgggttccccgggcgggtcgacgtgcgctcctctctggtctcgagtcaccaggaccagatcgaggatgcggccgaccccctgcccgatgtggaaagcgaagtctccacctcgtgattgggtctctgctgtcagagagcttcacgagcttgaggggaaacagacagagaggtctgggcattgggcagtttcccgcctcccagccccgcgcactgaacagactgtgaccagaactgcgaacaaagcgcggagggaagctcttaaaggaggccaaagcggccgggcgctgtggctcacacctgtaaccccagcctgtaagcctagctactcgggaggccgaggcagaaggagcgcttgaagccaggagttggaagctgcagtaatccgtgatcggaccgttgcactctagcctgggcaacataacgtcctttgaaaaaaaaaaaaaaaacagaggccaaaacgggtagcagtggtgcccgggcaccaaggatggaaggcctctctgaggaggtgatgccgagctgaagctgggaagcggatgtgagggaagagttccaggcagagggaaggcaaatgcagagatcctcaggcaggaacactgaactgttctccgtatttgaggagcagagggcgtgtcagtggtggccgcagcagctgagcaaaggtcttagaatcccagctaatgtcgtgggacctagcacccaatcccaaaagaaagaagaatagataggaacccactgttgacaagaaggtgcactgagaagtgtttttatctgacccgatctgcatccagtttagaagccgatacatcagggatttaacaatctgtcttaatgtctagcaaggggggttgctggagggaaaacacagagtcagagttctatcttcagccctgccagcaggtccctgggagatgctagacgagtgacttttctctgggcgtggttggtgtaagggatgcacacgcaggaggaaggtcggagtgtaaatgtgtgacctgggcctgttactgggtataaatgggcctgtagtgaccgggagctcatgttctaccaaaggggttgccaattttctgatttcgagtgtggcggtgtaaaagagaaaagcaactgctgccagctgggagctggtttgcaccctcactccagaagccttgatgttgctaggagctgacctggcaccaacagcacggccatggtggtgtcctgttgagcaaaataatttcacaaaaaacatcagacaaggtcactctctgactgatctagaaaaagaccattccataataaagcctcaatacagaaacaagaacattgtccaaaccacaaaaattaccaacacaatcctctctcccacagcgtaagttactgctgctttttttttggttgttgtttttgtttgttttgttttgtttttgaaatgaagtcttgctctgttacccaggctggagtgcagtgatgcaatcttggcttaccacaacctccacctccaggttcaagcgattctcctgcctcagcttccagagtatctgggattacaggcacccaccatcatgcccagatcatttctgtatttttagtagagacggggattcaccaagttgcccaggtgagtcttgaactcttgacctccggtgatatgcccaccttggcctcccaaagtgctgggactacaggtgtgagccactgcacctggccactgctgcttctttaccaagtacagttttagcttgattcattcctcccatcttctagataagaattattaagataaccaaaaagaattatccctacttcctgatagcatccaacccagagcaaatgcccccctttttggacccgcctaggaagtcccctaatgaaagttccaatcctgtaataagtcctttcacacatgttcttgctgagatgtctgtggtgttcagcctcccttgttcaactacaggtgcttcctggtggtccttggttggagggtactatcagaaatggaggagcaacaaagattcagctgaagccctcactgcctgggactgggacccttgactcgtcattgtatgcacacctgaaactgcttatgtcgctgaggtgccaacctgctgatggttggaagctaattgagttctgatattgtgttgatacccttaagcattgggtttactttttattttaattaattaattaattaatttttgagacagagtttcactcttgttgcccaggctgaagtgcaatgacacgatctcggctcaccgcaacctccgcctcctgggttcaagcagttcttctgcctcagcctcttgagtagctgggattacaggcatgcaccaccacacctggctaattttatatttgtagtagagacagtttctccatgtttgtcaggctggtctcaaactcctgacctcaggtgatccacccgcctcggcctcccaaagtgctaggattacaggcgtgagccaccatgcctggccatattttttatttttcattttttactttttgagatagggtctcactctgttgaccaggctggagtgcagtggtacgactcagctcactgcaacctctgcttcccagctcaagtgattctccagtttcagcctcctgagtagctggcactaaaattaaccaatgccggttaatttttttttttttttttggcgggggacagagtctcgctctgtctcccagagtggagtgcagtggcgctatctctgctccctgcaagctctgcctcccgggttcaagcaattctcctgcctcagccttctgagtagctagggttacaggcatgcgccaccacacctggctaagttttgtatttttagcaaagatggggtttctccatgttggtcaggctggtctcaaactcctgaccccatgatctgctcaccttggcctcccaaagttctgggattacaggcatgagccaccacacccaggaatgccggttaagttttatatatatatttttttgtagagatagggtttcactctgttacccaggctggtctcaaactcctgagctcaaagcaatcctcccaccttggcttcccaaagtgctgggattatagatgtgagccaccatgccctgccaagcattgggtttatttggtttttcagtttttttactcctggaataaggcccccacactggatttttggttatctgatcaaatatttattttgtccttggtgcaattgttttctgtccttctacactcattcctatggtgttttcttgtctagtattttgaatattgtttgtctataagaggcaaagtcgatataaaaaggatggatgtaggctgggcgcggtggctcaggcctgtaatcccagcaactttgggaggctgaggtgggtggatcacctgagatcaggagttcaagaccagcctggccaaaatggtgaaaccccgactactaaaaatgcaaaaaattagctgggtgtggtggcaggtgcctgtaatcccagctacttgggaggccaaggcaggagaatcgcttgaacttgggaggcagaggttgcagtgagccgagttcgtgccatggcactccagcctgggcgacagagaaaaaaaaaaaaaagtctctgtctcaaaaaaaaaaaaaaaagaaaagaaaaggatggatgtgtagcctcggatgtctaagggcatcacaaacctattattgctgaatctctggtgaccgaacacaacttatccctctaggaaggtagggatgccaactgttgaggggttgtgcaactagttagcatccgagagtcttatttgttatcagaattaaccagagaaatcactccagcaaccaagagccagtaagtgtgtcctacaaccagctccagagactgtacaattcggaaggtattctcagactaatgtcctttgggtaaactttgcccaggtcaccatttcttttttgtttttgttttttgagacagagttttactcttgttgcctgctgaagtgcaataggacaatctcagctcagctgcaacctccacttcccgggttcaagtgattctcatgcctcagcctcctgagtagctgggattacaggtgcctgctaccatgtccggctaatttttgtatttttgatagagacagggtttcaccatgttggccaggttagtctcgaactcctgacctcaggtgatccacccacctctggctcccaaagtgttgggattacaggcatgagccaccacgcccagccccaggtcaccatttcaaagccttgaaaaggatttctttggttttgtctatgtccttgcaaactgctttgtttcatttcttctgctcagtatcagggggctttctctggcctctgatcagcgatggtgtttggccacattctagagatacgaagttgtataagcaccattcttttagaccccagtcacaactaaaattgggccaaagacctgctcccttcatgttttctcacgattgcaataacatgtacccatatatctgtaactgacacaatttcaccagggacagtttgtaattgccgtagccatttggtggaacttttgataataacaagattgttcatttgggaggtgcctcagaacacaaagggaagaaacctttgtgagattgtttgccttgtttgttaaaaacaaagattattttgtttaacataggcaatatttcatttacctattttgcatattaataaatgctgtcggccaggcacagtggctgacacctgtaatcccagcactttgggaggctgaggcgggcgaatcacttgaggtcaggagtttgagaccagcctggccaacatggtgaaaccccgtctctactaaatatacaaaaatcagccaggcttggtggtgcgcacctgtaatcccagctactttggaggctgaagcaggagaattgtttgagtccatgaagtggaggctacagtgaactgagatcatgccattgtactccagcctgggcaacaagagcaaaactccatctaaaaaaaaaagaaggccctcaccagatgtggctgcttgactttggaattcccaccctccagaactgtaagaaataaatttttaaaaataaagtacccagcccctcaggtattctattgcaacacagaatggactaagacagtgtttatatgtcaaaatctattttcctgtgtttaaactgtcttccttctccttgcagagggaatataaccttagccttttggagtgataatttcatgtttgtctgaagtagcttcttctcacattttctttttttttttttttatgttcaaaatgcttttatttctaggaatttagttttatttttaattttttaattattatactttaagttttagggtacatttgcacaacgtgcaggtttgttacatatgtatacatgtgccatgttggtgtgctgcacccattaactcgtcatttagcattaggtatatctcctaatgctatccctcccccctccccccaccccacaacagtccccggtgtgtaatgttcctctttctgtgtccatgtgttctcattgttcaattcccacctatgagtgagaacatgtggtgtttggttttttgtccttgccatagtttgctgagaatgatggtttccagcttcatccatgtctctacgaaggacatgaattcatcaatttttatggctgcatagtattccatggtgtatatgtgccacattttcttaatccagtctatcattgttggacatttggcttggttccaagtctttgctattgtgaatggtgccacaataaacatatgtgtgcatgtgtctttatagcagcatgatttataatcctttgggtatatacccagtaatggaatggccgggtcaaatggtatttctaattctagatcactgaggaatcgccacaccagcttccacaatggttgaagtagtttacagtcccaccaacagtgtaaaagtgttcctatttctccacatcctctccagcacctgttgtttcctgactttttaatgatcgccattctaactggtgtgagatggtatctcattgtcttctcacactttcctgctgtccatttcattctctttttcctcacctctcttggaaagctttaaagattaactaatcaaaaaatttttcagttgtatgtgcacagtctaggtaaatccagtcctaaaagaaatagaaatgcctaaaatgctaaaagaaacagaaaatcatatatatatacgtatatacatgtatatcaagatcagcttgggtaacatgtgagaccctgtctatacaaaaaaaaatacatgtatatacgtatatatatatagtgtctgtacatataggcactaaaaagtatatttatgtaatagcctttgctcttccagttagaagaaaagatctatcacgcctgtagtcccagcactttgggaggccgaggagggcggatcacgaggtcaggagatcgagaccatcctggctaacacggggaaaccccgtctctactaaaaaaaatacaaaaaaattagccaggcatggtggcgggtgcctgtaatcccggctactcaggaggctgaggcaggagaatcgcttgaacccaggaggtggaggttgctgtgagccgagattttgccactgcactgcagcctgggcaacaagagcaaaaactccatttcaaaaaaaaaaaaaaggtcttagttccaagacaaaagaagagcttttggcatgattcagttaaattttttattcactcatgtaaaaatgatgccagcgtgatattttggtttgtacaagaacagggttaattctctttctctctctctctctctctgagacagggtcccactctgtcaccccatctggactgcagtggcatgatcatggttcactgcagcctcaaccttctgggctcaagagatcctcctctctcagcctcccaagtagctgggaccccaggcacacaccaccatgcccagccaattttttgttgttgttgtatagacagggtctcacatgttacccaggctgatcttgagctcctgggctcaagcagttctcccaccttggcctcccaaagtgttgtgattacagacatgaaccactcactgctcctggccctcatgatttaagccttctcaatgtatttatgttgatcttatgagttaagtaaattgtgatggttttcataaattgtttaaatgaaaattatacacaggcactccttgttttattacacctcactttattgctcttcacagatattgcatttcttacaaattgaagatgtgtggcaaccctgtgttgagcaagtgttttttgtttgtttgtttgtttgtttttgcagtggagtcttgctcaggaggctgaggcaggagaatcacttgaatccaggaggcagaggttacagtgagccaagatcgcatcactgcactccagcctgggcaacagagcgagactctgtctcaaaagaaaaaaaaaaactggaacagcctgattgctgatatggagaaagttttagtggcctgaatagatcaaaacagccacaacagctctaaatctcttcattactatgaagactgagagggattaggaagctgcaggagaaaaatttgaaggtagcagaggctagttcatgagatttaaggaaatgagccatctgcagaacataaaagtgcaagatgaagcagcaagtgctgtgtagaagctgcagcaagttatccagaagatctagtaagataattgatgaagatggtttactaaacaacagatttccaatgtagacagaacagccttctattggaagaagatgccatctaggaattttatagctagagaggagaagtcaaagctttgaaggacaggttgactctcttgtcagggactaatgcagctggtctggtgactttaagttgaagccaatgctcattaaccattttgaaagtcctagggccctgaggaattatgctaaatccattctgcctgtcccctattaatggaacaaaaaagcctgaatggccacatgtctgtttatagcatggttcatggaatattttaagcccactgttgagacctagtgctcagaaaaagagattcctttcaaaatattatgacagttcctctggtcatccaagagctctaatggagatgtacaaggaaattaatgctgttttcctgcctactaatgcagtatctgttcttcagcccataagccaaggagtaatttcaattttcaagtcttcctgcagttgacccttgaacattgtgggggttaggggtgccaaccccaacacagttgaaaatccatatataactatttttcttttgtagagataaggtcttaatatgttgcctgggctggtcttgtactcctggcctcaagcaatcctcccacctcagcctttttctttttttttttttttttttgacagagcctcgatctgtcacccaggctggagtgcagtggtgtgatctcagctcactgcaacctccgcctcctgggttcaagtgcttctcttgctccagcctcccaaatagctgggattacaggtgtccgccaccacacccagctaattttagtatttttaatagagatggggtttcaccatgttggccaggctggtcttgaactctgaccacaagtgatctgcccacctctgcctttcaaagtactgggattacaggtgtgagccactgcccctggccttggcctcatataacttttgactccccccaaacttaactaccaatagcctactgtgaaccagaagccttaccaataacagaaacagtcaattaacacatactctgcatgttttatatattatatactgtagtcttacaacaaagtaaagtagagaaaagaaaatgttattaggaaaatcataggaagagaaaatatatttatggtactgtactgtattatgtataccataagtttatgtcgtatgtttataagatgaatcatctgtctgaaatggtgggcagccacagctgcagaccccaatccacattacatatcaagcagttgaacttttttttgtaatgtcatgactttcccctgcttcttagaagcacttccagcatgactagtggcacttcacgtgggtcccgtggtgttatacaaggcttacagtattgcactaaacacaataaagaacacaggagaaccacaagagatcactttttactgtaatacataatttactggagagataaactgctcatgtggagatgattagcatcacatagcatttaaaaaattattttttctgctgcactttaaaaattcttttactttttttttttattattattttgttgatgttgagatggagtcttgctctgtcacccaggcaggagtgcggtggcacgatcttggctcactgcaagctctgcctcccgggttcacgccattctcctgcctcagcctcctgagtaagctgggactacaggcgcccgccacaacgcccggctaatttttttgtattttttttagtagaaacaggatttcctcatgttagccaggatggtctcaatctcctgaccttgtgatccgccctcctcagcctcccaaagtgctgggattacaggcgtgagccactgtgcccggcctgctaattttttaattttaaattattatgggtgtattagtccattttcatattgctatgaagagatacttgagactcggtaatttataaagaaaaagaggtttaatagattcacagttccacatgtctggggaggcctcaccatcatgacagaaggcgaaggaggagcaaagacacgtcttacatggtggcaggcaagagagtgtgtgcaggggaactgccctttataaaactatcagagctcatgagacttattcactatcatgggaaccgcatgggaccatcttggttcactgcaacctccacctcccaggttcaagcgattcttgtgcctcagcctcccaagtagcggggattacaggtgcctgccaccatgcctggctagttattgtatttttagtagagatggggtttcaccatgttggccaggctagtctcgaactcctgacctcaggtgatccacttgccttggcctcccaaagtgctgggattagaggtgtgagccaaatttttcttgagttacaaaagaagaccatagagagtcaaaggtaacaggatgaagataaggaagatcagataaagaaaactttaattaaaagggtattaaagacaataacaggcaatatgaataacagaacaaagggtaggaaaacgggtaatgcacagccatagaaatgaacaaaatcatgtcctttgcagcaacatggatgcagctgaaggccattatcctaagtgaattaacacagaaacagaaaacctaatatcatatgttcttacttgtaagtaggagctaaacattgagtacacatggacataaagatgagaacaatagaagctgggaactgcagaggggaggaagggaggagaaagggctgaaaaacttgctattgttccctacttgggcgatgtgatcagcagaagcccaatcttcagcatcacacaacatgtcctggtaacctctgcatataaaattaaattaaattgaaaaaaaggaaaagggccaggtgtggtggctcacatctgtgatcccagcactttgggaggctgaggcatgaaaattttttgaggccagaagttcaagaccagcctaggcaacacagcaagaccctgtctctacaaaaaaaaaaaaattttaaattggctaggtgtggtgatgtatgcctgtatgtctaactactcaagaggctgaggtgggaaaaaattgcttgagcccaggagatcgaggctacagagagctatgaccaccactgcactccaaactgggcgacagagtgagatgaacccatcacccccctaccataaaaaagcagaagaagaaaggaagaaaataaaaaaggtaccgagtaatcaaataactaatcttgttctgttgtattccgcaggagaaggtgacatatgtcttttcatttgggaaatgtgaatccaaggatcaacaaacaagttttattattgtgtcagttacctgttaagatactttccttggccaggcttggtggccgacatctgtgatttcagcactttgcaaggctgaggtgggtggatcacttgagaccaggagctcaagaccagcctgggcaacaaagggagacctcgcttctaaaaaaattaaaaagattagccgggcattgtggtgtgcacctatggttccagctacttgagagactgaagcaggaggatcctttgagctcgtgaggtagaggccacagtgagccttgatcatgccattgcactccatcctaggcaaaagagcaagaccccatctcttaaaaaataaataatactttaaattttagaatacattgcatgaaacttaccatcttggcttttttttttttttttgagacagagtcctgctctgtcgcccaggctggagtgcagtggcgtgatatgggctcactgcaaactccacttcccagattcaagcaattcttatgcctcagtctgctgagtagctgagactacaggcacacatcaccacgcccagctaatttttgtatttttagtagggacggggattcaccatgttggccaggctggtctcgaactcccgacctcaggtgatccgcctgtctcggcctcccaaagtgctaggattacaagcatgagcggctgtacctggcccatcttggcaatttctttttttgaaatggagtttcgctcttgtcaccaaggctggtgtcaagtagctgggattacaggcgcccgccatcatgcccggctaatttttgttttgttttgttttgtttttgagatgaagtttcgctcttgttgtctaggctggagcgcaatggcgtgatcttggctcactgcaacctctgcctcccaggttcaagcgattctcctgcctcagcctcccgagtagctgggactacaggcgcccgccaccacacctggctaatttttgtatgtatagtagagacagggtttcaccatgttgaccaggctggtcttgaacttctgacctcaggtgttccacccgcctcggcctcccaaagtgctgggattacaggtgtaagccaccgtgcccggcctaatttttgttttttttttaatagaggtggggtttcaccatgttggccaggctggtctcaacctcctgacatcaggtgatccacctgccttggcctcccaaagtgctgagattacaggcgtgagccactgcacccagccaacatcaacaattttatagaacaccacgacagagacaaggccactctatgactgtggtggatcagacaaaaacaaagccactgtgtactcatgatgtctgaacacagacaaaaacaagaacattgtccaaactatttagtcctgctcctttctcccacctttcagttgaaaattacggtactcagacatagaattacctcttcctggccgggtgcggtggctcatgcctgtaatcccagcactttgggaagccaaggcaggcagaccacgaggtcaggagatcgagaccatcctggctaacacagtgaaaccccgtctctactaaaaatacaaaaaaaattagctgggtgtggtggcgggcacctgtagtcccagctactcgggaggctgaggcaggagaatggcatgaacctgagaggcggagcttgcagtgagccaagatcgcgctgttgcactccagcctggagacagagcgagactccatctaaaaaaaaaaaaaaaaaagaattaccccttccttcctgatgcatccaaaccagagcaaaccctcttgcctcaaatcctctcctgaaacataacacgagcataagtcctacaataagtctttttttttttttttttttaattagacacgtggggtttcactatgttgcccaggctggtcttgaactcctgggcctaagcgatcttcctgccttggcattccatattgctgggcttacaggcgggagccaccatgcccagtctaagtcatcttcaacacctctttctgagatgccttagagttccccatattatgtgggtctgcctcattgctatgagtccgtaaaactgactttgttttttgttttgggttgtttttttttttttttttttagacatggtctcattctcttgcccaggctggagtacagtagtgcaatcatgacctactgcagcctcaacctcccaggctcaggtgattctcccacctcagcccccttgagtagctaggactacaggcacatgccaccacaccccactaattttttgtattttttgtagagatggagtttcatcatgttgcccaggctagtctcaaacccctatgttcaagcaatcctcccaccttagcctcccaaagagctgggattacatgcatgaaccaccacactcagtcccccaacgttgttttaaaactttcttttaggtgtgttcttggtggcccttaacagaaggacattgacactggaatctggatgtttgtttgttttggagacaggatcttgctctgtcacccaggctggagtgcagtggcacaatctcggctcactgcaacctctgcctcctgggttcaagcgaatctcgtgcctcagcctcccaagtagctgggattacaggtgcctgccaccacacctggctaatttttgtatttttagtagagacagggattcaccatattggccaggctggtcttgaactcctggcctcacgtgatccacccacctcggcctcccatagtgctgggattataggtgtgagtcactgcacccggcctggatttttttttttcagtgaaagatactgattttttttaagttgactcaaagcaagttttaaacactctgtgtccacttcatgttgctatcacagaatatcacagtctgcgtagtttaggaacaatagacatttatttggcttatggttctagaggctgtgaagtccaagatacaggagctgcctctggtgagacatcatcacgtggcaagagagcatgagagagagaaagagggggctgaatttgcttttataacaaacccattcctgaaataatggcattaatccattgacctaattgcctcttaaggatctcacctctcaacagtattacatcagggattaactttccaacacctgagatttgagggactcattcaaaccatagtactctgaaattggatatataggtctatgggtgagattcccactgagggttgccagtttgcaacctttcagttgaatggtctccctcctggatgtcaaggttaatactgctatgaacagctattatgcacctaagttgaaccagggagagaacacatccttccgcatgtactattttatttaatgttattttctactaagtcattcagaactctctggactctcttcatgctgtgtaatttgcaaggttgcctgctgcatgtttggttataaatgaggtcaaatcccaattttgcaggaggacgtggatgtatgcccattcccttcacactgtgagccagtagccatgggaactataatcaagtacacaataactcccccatgaacaaatcctcagggaacaagcttcaattgaatgaaactggcttgaccacagaggaatctgggggactttctgagcttcgcggacttgtgccgcctcctgactttaagctggctctggaggaggaggaagtggaggtatctcaggtatggacctctttctggaagctgggacttggaccaggcaaagaaaggaggcggtggggaaaattcccccagagaaggcaggagtgggccctgcataccaggtccccaggtctctgagagctttactagttctgggagtgtgtggatcaagcctaaagtctagaaggaattctagcatcacccagggcgttggctggaatatctttaaggacccttccagccctggaatcatagcagcaaaggacccaattgtatgacagctgctttggccagtgaagatggaaagaccaggaaaagctttaggctaagcaatggagttcacaccccgctaattcacctcccttgcggcatccctgacatttcccacacaatatgtccttcattctgttctccaaaaagccattgccttcctctaactgactgagatgagccctggaaaccctgatgcccaccagacccctgcctttcctcttctctgctgttggccaaggtttctgcctcagttgccctgtctgacaatacagtttccctaggactggagctagccctggcatcccagaatccccaacaggtgctagcccctggagtcaggactgtcttcctgtgtccctgtgcttgctgcagaataaactgattacttttaactaccattctgaatatagtcactaccaggaaccgctgactacctgtgacataccatctagcatggtaccacagcacctggcccagcatcttgggaggccaaggtgggaggactgcttgagggcaggagtttgagatcaacctgggcaactacatagtgagaccccacctctacaaaaaatttcaaaattagccgagtgtgattgcacatgcctgtagtcccagctacttgggaggctgaggcaggaggatggattgagcacaggaagtggaggctgcagtgagctatgattgcaccactgcactccagcctgggagacaaagggagattccgtacataaataaacaaataaataaaaaacaaaggagatggatttttttctacaagagagttacatgcagggtgctaggtactataggtggagacttgccgaggttcagtgggaatgggagctcaatcctgagagtgggggaaggcattacagaggctgtgacctttgagactggtcttgaagaaagagaaaatgtgtacaaggcagaaagaagggagaaagttacccgaagagagaactgcaccagccaaaaatatggaggtatggagtaggtagaattgtgagacatttatgtgactggagtgaaaaatgagagatgatgctggaaaggagagttaaggccaggttttgaaggatctcttaaaaaaataataggctggcgagattgtgccactgcactccagcctgggcgacagagcaagactccgtctcaaaaataataataataatagtaataataggctgggcacagtggttcacacctgtaatcccagcgctttgggaagccaaagcgggcagatcactcaagatcaggagttcaagaccagcctggccaacacggcaaaaccctgtctctactaaaaatacaaaaattagctgggcgtggtggtgtgcacctgtagtcccagctactagggaggctgaggcagaagaattgcttgaacccgggaggcgaaggttgcagtgagcagagattctgccactgcactccagcctgggtgacagagcaagactctgtctcaaaaaattaataatgataataatacattaattttgagataagatcttgctctgtcgcccaggctggagtgcagtgatataatcacagttcactgcagcctcaagctcctgggcttaagcgatcctcctgcctcagcgtcccaaggtgctgggactacaaccatatgacactgacggagcaagagcactgtcatctgggacaaacaccgcccctttaagttacagctccctttctagcctcatgcatttcaaggaaatcacttctcttctaactacaagcagacagaaagagcagacaggaaaacgcagataagacagtttgggcatagagggaggtgggggcaaagtctcttgggtaactgccaaacttcaccctcatacaacgggccccagtaaaacagtgggccttaggccgggcgtggtggctcatgtctgtaatcccagcactttgggaggctgaggtgggcagatcacgaggtcaggagttcgagaccagcctgatcaacacggtgaaaccccatctctattaaaaatacaaaaattagccgggcatggtggcgcgcgcctgtaatcccagctactcaggaggctgaggcaggataatcccttgaacctgggaggcagaggttgcagtgagcctagatcacgccactgcattccagcctggacaacagagagagattgtctcaaaacaaacaaacaaaaaaataatgggccttaataagcacatttctttcccttcagttgcactaagatagggaagttaaaagcagactcaggggatatgcctatagctgcagaaaaaagataagcacaagataagcacaacaaagagacacagaagcagtccaagcctctgataaactctcccaccctgaatccttacaaactctttgtaagaaagggtggctctgacctaacttggccagctgccaagtttattattcaaaataaacctgtccctgatgactgtcaaaccacccttcatgtttctctcctctttctttaattcttacagccaccacgcctggctaatttttttgaatttcactggaggtcttgctgtgttgcccaggctggacttgaactcctgagctcaagtgatcctctcgcctcagcctccgagtgttgggattgctggaggatcatatctgtttccaaaggtggagctttctgctggaggcagcagagttcttcaggcagagcagctgagtcttgaggttgctcttttaggaaacaaactcaggaggcgctgtggaagatgcattgaatggagtaggaggtggaggcagcgagaagggtgaggagacactgctgagccctgatgagagacaaagaatgtctgaaggaagcaaagggaatggagaggaggggaaggctttgggaagactgtgatgcatggaatgcgtgggataagggcagagggtggagtccaggctgactcagaggtttattgcctgggagactgggtagatgattacactgtaacctgagatgaagatacagtaagaggagtttatatgaagaaaaagtaggccaggcgcagtggctcacgcccataatcccagcactttgggaggctgaggcgtgtgaatcaccttagccccagagttccagatcagcctgagcaacatagagaaatctcatctctactaaaattcaaaacaattagctaggtgttgtggtgcagacctgtagtcccagctacttgggagtctgagatgggagaaccgcttgggcccaggaggtcgaggctgcagtgagtcatgatcgtgctactgcactccagcttgggcgacagagcaagacactgtctcaaaaggaaaaaacagaaaaagtaataagctcagtttttaaacagaaattgtagtagaatacaatgtaaaatttaccatttaaccattttacagtgtacaattcagtggcattaagtaaattcacaatgtttgaaagcatcaccttgatctagctccaaaacattctcatcaccccaaaggaaacccccaaatccattaggcagtgattctctattcccctgtgtgcccagcccctggcagtccctaatctccctgtagatttgcctgttctggacatttcatatgcatggaatcatacgatatgtgactatagtttatggctggccactttcacttagcacaatgttttctttctttcttttttttttttttttttgagacggagtctcgctctgtcacccaggctggagtgcagtggcacgatctcggctcactgcaagctccgcctctcggggttcacgctattctcctgcctcagcagagtagctgggactacaggcgcccgccaccacgcccggctaattttttgtatttttagtagagatggggtttcaccgtgttagccaggatggtctcaatctcctgacctcgtgatccgcctgcctcggcctccctaagtgctgggattacaggcgtgagccactgtgcccagccagcacaatgttttcaaggttcatccatgttatagtatgtatcagaattcttttttttggagactcagagccccattttttttggagactcagagtctcattctatcacccaggctggagtgcagtggtgcaatcttggctcactgcaacctctgcctcccaggttcaagtgattctcctgcctcccgagtagctgggataataggcaaacgccaccatacccagctaatttttgtatttttagtagagaaagggtttcgccatgttggtcaggctggtctcgaactcctgacctcaagtgatctatctgccttggcctcccaaagtgccgggattataggcgtgatccaccgcgcctggccccttacccatttttcaattggtcaattttctttttcttattgaattgtaagagttatttctatgttttaaatacaagtactttatcagatgtaagatttgcaaatactttttcccattcggtgagctgtcttttcaccttgtggctggtattcttttttttttttttttttttgagacagagtcttgctctgttgcccaggctggagtacagtggcaggatctcggctcactgcgagctccacctcccgggttcacgccattctcctgcctcagcctcctgagtagctgggactacaggcgcccgccaccatgcccggctaattttttgtatttttttttagtacagatggggtttcacggtgttagccaggatgctctctatctcctgacctcgtgatccacccgccttggcctcccaaagtgctgggattacaggcgtgagccaccgcgcccggccttgtgggtggtattctttgaaacacaaaactttttattttgatgaagtcccctttatctatttttacttttgttacctgtgcttttggtatcatatctaagaaatcattgccaaatacaatatgatgaagattttcccctatgttttattctaggatttttatggtttttgcacttaagtttagatctttgatccattttgagttaattttttgtatgtgagctaagctttctatgtggggtacagaaaagggctaacctcattattttgcatgtttcccccaccccctgcccaccaacatttgtcaaaaatacgaatcctttcccccattgaatagtctaaacaactattttcaacaagggaaaatagttgaaaatcaattgttgaaaatcaattaaccatatatgtgaggatttatttctgggttctctattctactccatttgtttctctatctacccttaggtcagtatcacactgggttttttcttttgtttgttttaactttttaaatttcttgtttttaatttttgtgggtacgtagtaggcatatatatttatagggtacaggagatactttgatagaggcatgcaacgcataataatcacatcatgataaatggggtatctatcccctcaagcatttatcctttgtgttacaaataacccagttaaattctttcagttattttaaaatatacaattaaattattattgactggcctggcgcagtggctcgtgctgtaatcccagcacttttggaggccgagatgggcggatcatttgaggccaggagttcaagaccagcctgaccaacatggtgaaactccatctgtactaaaaagacaaaaaaagttagccaggcctcaggcgcctgtagtccccactactcaggaggctgagacaggagaatggcgtgaacccaggaggcagagcttgcagtgagctgagatcgtgccactgcactctagcctgggtgacagagcgagactccatctcaaaaaaaaaaaaaaagttagccaggcctaggggtgcacgcccatagtcccagctacttgagaggctgaggcaggggaattgcttgaacctgggaggcggaggttgcagcaagccaagatcatgccactgcactccaccctggttgacagagctagactccgtctcaaaaaaaaaaaaagaatggcctggcgctgtggctcatgcctgtaatcccagcactttgggaggccgaggcggggggcagatcatgagatcaggagttcgagaccagcctgaccaacatagggaaacccgtctctactaaaaatacaaaaattagccaggcatggtggtacatgcctgtagtcccagctactcaggaagctgaggcaggagaatcgcttgaacctgggaagcagaggttgcagtgagccaagatggcaccactgtactccagcctgggcaacagagcaagactctgtctcaaaaaaaaaaaaaaaaagaagaatcatattgctaaaaaaaatagtttttcattctgtctatatgtcataagtgagatgacttgaactccctaagcatatgtgtccattatttccaccattaaaatgaattaaggtgcttggcatgactgccccctgtttattagttctaatagttttttagtggagtctatgttttttctaaatataagatcttatcatctgcaaacaagaataatttttacttcttcctttccaatttggacgccctttgtttctttctcttgtctaattgttctagctaggtcttccagtactatgctgaataacagtggtgaaagtgggcatccttgtcatgttccagatcttagaggaaagtctttcgggttttcctcattcagtatgatactagctgtgggtctgtcatatatggtttttataatgttgaggtatgtttcttctacacccagttttttgagggtttttattatgaagtagtgttgaattttatcaaatgctttttcagcatcaattgaaatgatcatatggtttttgtctttcgttttgttgatatgatgtaccacattaattgatttgtgtatgttgaaccatccttgcatccctgggagaaattccacttcgtcatgatgatctttttttttttctgaggtggagtcttgctctgtcacctaggctagagggcaatggcacaatctcagctcactgcagcccctgcctcctgagttcaagtgattctcctgcctcagcctccccaggagctgggactacaggtacatgccaccacacccagctaattttttttattgtagagtcaacattttgccatttacccaggcaaaatgagtaacattgtgacctcctgggttaaagtgatcttcctgccttagcctatcaaagtattgggattataggcatgagctaccatgcccagccaaatactatcttattacccattattttaaactgataactgatgacaacttttttttttttttgagacagagtctcgctctgtcgcccaggctggagtgcagtggcacgatcttggctcactgcaagctccgcctcccgggttcgtgccattctcctgcctcagcctcccaagtagctgggactacaggcacccgccaccgtgcccaactaattttttgtatttttagtagtgacggggtttcactgtgttagccaggatgatctcgatctcctgacctcgtgatccacccgcctcggcctcccaaagtgctgggattacaggcgtgagccaccacgcccggcaaactgatgacaacttaacactggttgcataaacaaacaaacaagcaaaatgaaaaaaaaaataataaaaactctacactttaacttcctccccccctgctttttttttttttttttttgagatggagtctcactctgtcgcccaggatggagtgcagtggcgctatctcagctcactgcaacctctgccttccatggttcaagcgattctcctgtctcagcctcctgagtagctgggactacaggtgcacaccaccacacctggctaatttttgtatttttagtagagacggagtttcaccatattggttaggcttgtcttgaactccagaccttgtgatccacccgcctcagcctcccaaagtgccgggattacaggcatgagccaccgtgtccagcccccactgctttttaatgtggttccctttatgtcttattgtactatgccttgaaatgttgtagttattgtttttttattggttcattgtttagcttttctacttaagagtagttggccaggcgcagtggctcatgcttgtaatcccagcactttgggaggcctaggtgggtggatcacctgaagtcgggagttcaagaccagcctgaccaacacggagaaaccctgtctctactaaaaatacaaaattagctgggtgtggtgatacatgcctataatcccagctactcgggagactgaggcaggagaatctcttgaacccgggaggaggaggttgcagggagtcgagatcgcaccattgcactccagcctgggcaacaagagtgaaactccatctcaaaaaacaaaacaaaacaaaacaaaaacagataatggtagtttatataccaaaattacagtgttataataccctgtatttttctgtgtgcttgctattaccagtgaattttgtaccttcaaatgatttcttattgctcatgaacatccttttctttcagattgaagaactccccttagcatttctcgtaggacaggtctggtgttgatgaaacccttcattttcgtttgtctgggcaagtctttatttatccttcatgtttgaagaatatttttaccagacatactattctagggtaatttttttttcttttagcactttcaatgtcatgccattctttcctggcctgtaaggtttccactgaaaagtctgctgccagatgggaattggagctccattgtgtgtttttttgtttgttgtttgtttgtttgtttttctgagatggagtctcgctctgtcgcccaggctggagtgcagtggcgggatctcagcttactgcaaacttcacctcccaggttcaagcgattctcctgcctcagcctcctgagtaactgggactacagacatgcaccaatacacatgtgtgtgtgtgtgcgtgtgcgcgtgtgtgtgtatttttagtagagacggggtttcaccatgctggccaggctggtcgtgaacttctgacctcaggtgatccacccacctcagcttcccaaagtgctgggattacaggcgtgagccaccacgccttctaatgcattctttagtatgtcaattgcattttccaactctagaatttctgcttatttttagttatttcaatctctttgttaaatttattgatagaattctgaattccttctctgtgttattgtgaatttctttgagtttcctcaaaacgtcttttttgaattctctgtctgaaaagtcccatctgtgtttctccaggattagtccctggtggcttctttggttcatttggtgaggtcatgttttcctggatggtcttgatgcttgtcaatgttcatcagtgtctgcacattgaagagttaggtatttattgtagcctttgcagtctgggcttgtttgtgcccatcttttttgggaaggctttccaggtatccaaaaagacttgagctccaagcccaataacactgtggttcttgtggactcatataagtaccaccttggtggtcctagataagatccagatgaattctctgattactaggcagagactcttgttctctttccttactgtctcccaaataaatggagtctctgtctctttgctgagcttcctggagctaggggtggggtgatgcaagccttcttatgaccaccaccattaggactgtgctgggtcatacctgaagccagcacagcagtgggtctcacccaaggcccactgtaaccactacccgaataccatctatgttcactcaaggccctagggctctacaatcagcagctagggccaccagtctgatttctatctttcccttcagggcagcgagttcctccaggtcctgggagggtccagagataatgtctgggagccacggattagagtcaaaaaccttagaaatctacctggtgttctattctactgcagctaagctgggactcaaaccacaagacaaagtgcctcccactctaccttcccctttccatggacagaggacagaggagcctctcccagtggccactaccaccactggcctgcagagagttctgaacactcacttaaagcccaaggcctcttcaagtcaacttgtggtgaatgctctcaggcctgggactcaccctttaggacagtgggtccccctctggcccacagcaggtccaaaaatgttgtccaagagcttaggtctggactcggggaccccaaaaatctgcttggtaccctaccccactgtgtccgagctggtatctaaggggcaagacaaagttccctttactcttctctccacttttctcaagcagtagtctttcaccagggccaccacagctggtaatgtgctgggccctacctgaagccagcacaactcagactcttatccaaggtccacagatactacctgggtattgctgttggctattcagggaccaagggctccttagtcagcaggtgataagcccttccaggactgcgtcctcccttcaggacagcaggctcccttctggcccagcgcatgtctaaaaatgtcatccaggagctagggcctggaatgagggcctcatgactgcctggtgctctatcctattgcggctgatctggtatccaagatgcaagacaaagtcctctttactctttgctttcctctcctcaaacacaaggaaggagttactttcgttgctgtgagctatgccgcctggaatcgggggaagggtggtgcatgcactcctttagctgccccaactactgcctagctaggtcatgtgccatcctagtccactggctctaaggccagcccagcactaggacttgcctagaagttgcagtccttgtatcctaaaatgcctttcaaatttacctaggaccccagagcactttagcctgcagtggcaaggcttgccgcaacttgagttctgaccactaggatggacaattcccctctggttcgggctgatacaaatgctccctccttgggcaggcactggctgagtccagcatggctttgctctccactgtgacagggcagcactgagttcactggcaagtccctcagttcaatgccaagtcccccagtccatgtgctctctctcctccaagtgcacagtttctctctgtgccatgcagctactgctagggggttggggaggggtggtgtcagcgattcaagacagtgtttcctgcccgggcacggtggctcacacctgtaatcccaacactttgggaggccaaggcaggcggatcacttgaggtcaggccaacatggtgaaatcccgtctcactgaaaatacaaaaacccggcgggcgtggtggcacatgcctgtagtcccagctactagggaggctgaggcaggagaatcgcttgaacccgggaggcagaggtttcagtgagccgagactgcaccattgcactccagcctaggcaacagacaaagggagacttcatctcaaaaaaaaaaaaaaaaaaaaaaaggctgtctttcctaccctcttcagtgcctctttcagtgatatgaagttaaaatcagctactgtgaccactcacctgatttttggttcttatgatggttctgaggaggcttctattctgccatcttgctctgacttcccactacattgtgttttgtttgtttgtttgtttttgacattcactctgtcacctaggccggagtgcagtggccaaatctgggctcactacaacctctgtctcccaggttcaagcaattctcgtgcctcagcctcctgagtacctgggattacaggcgcttgcccccactccggctaaatttttgtatttttagatggggtctcaccatgttgcccaggatggtattgaactcctggcctcaagcgatcctcccgcctcagcctcccaaagtgctgggattacaggcatgagccaccacgcttggcccccctacagtttttgtttggttgtttgtttgagacagagtctagctctatcccccaggctggagtgcagtggcgaaatcttgtctcactgcaacctccgcctccggggttcaagcgattctcctgcctcagcctaccgagtagctgggattataagcactcgccacccagttaatttttgtatttttagtagagatggggtttcgccatgttgaccaggctggtctccaactcctgacctcaggtgatccacccaccttggcctcccaaagtgctgggattacaggcgtgagccactgcacccagcccctacactgttttgattatgatagctttgtagtaagttttaaaatcaggaaattgagtccttcaactttttttcaagaccattttggtattcagggtcccttgagattctgtatgaattttaggatgggtttttctgttccactgccctccagcctgggtgacagagcgagactccatctcaaaaacaaaaaaacaaaaaaaaaaatcatagggatttgatatgatttgttaggaatttgcattgaaactgcagatcgctttgggtagtattgccatcttaacactattaagtccttcaatccatgaatgtgggatgttttctcttttgggggtcttctttaatttatttcagcagtatattgtaattttcagtgtacaaatctttgagctccttggttaaatttctaagtattttattattttgatgctattgcaaaggaagttattatttaaatttccttttcaaattgtttgctgcaagtgtataaaatctgagttgattttatgtcctgcaactttgctgaacttaattctaaaatttttgtgtggatttcttatgatttttctatatataattatataatctgtgaaaagagatccttttacttcttcctttccaatgtggaagtcttttgtttcttcttggcgaattgctttgcctagaacttctagtactttgttgaatagaagtggtgagagcaggcatccttgtcttgttcctggtctgagggtacaagcttttagtctttccctgtagagtatgatgttagctgtggtttacggcctttatcatttggaggacattcctgtctatttctagtttattgagtgttttaatcatgaaaggggtttggctgggcgcagtggctcactcacgcctgtaatcccagcactttgggaggccgaggcaggcagatcacctgaggtcagaagttcgagaccagcctgaccaacatggagaaaccccatctctactgaaatacaaaaaaattagccgggtgtggtggcgcttccctataatcccagctactccagaggctgaggcaggagaattgtttgaacctgggaggcagaggctgtggtgagccgagatcacgccattgcactccagcctgggcaacaagagtgaaactccgtctcaaaataaataaataaataaataaataaataaataaataaataaataaataaaatcatgaaagggtgttcattttttcaaagccttttctgcatcaattgagatgaccatgtgttttctccccggttcattctattaatgtggtgtattacattgatttttttcttttttttaagacagagtcttgctctgtcgcccaggctggagtgcagtggcttgatctcagctcactgcaacatctgcctcccaggttcaagtgattctcttgcctcagcctcccaagtaactggtattataggcacctgccatcatgcatggctaatttttgtatttttagtagagacggggtttcaccatgttgggcaggcttctctcaaactcctgacctcaggtggtctggctgcctcggcctcccaaagtgctgggattacaggtgtgagccactgcacccagccacactttgcatattttgaagtgcatctatttacttagcattcgtgacttgaataatttcaccaaatgaataattttgggtagtttgaaattcgttcttccaattgttacaccttgtttggtgtttgtaataaacacgtaaaggtaaaaaaaaacagtttttctgtattctgccaatcatacttttatataataaatcatccatttttttcccataaaaaaaaagaaagttattgcttaatgttacagaatttctgtttggagtgatgaaaaagttttggaaatagtagtgacagttgcacaaaattgtgaatgtaattaataccactgaactgtgcacttaaaaatagctaaaatggccaggtgcagtggctcatgtctgtaatcccagcacttccggaggccaaggcaggtggatcacctgaggtcaggagttcaagaccagcctggccaatacggtgaaacctcgtctctactaaaaatacaaaaaattagccaggtgtagtggcagacacctgtaatcccagttacttgggaggctgaggcaggagaatcacttgaactcaggaagtggaggttgcagtgagccaagattgcaccattgcattccagcctgggcaacagagcgagatctgtctcaaaaaaaaaaaaaaaaagctaaaatggcaagttttatattatatatgttgtttaccacacacacacacacaaatactaagaaaaaaatcaggcagatcctcttctaacaacacttacagtctattaagtgaatctgggcattttaaagaaaaaaataactatttttggttacggaatcaggatagtagttgcctatggacacgggcagtggggactgactagaaagggaagggaaggaagttcttggacctagaagtgttttatgtcttgattggggtgtttagataggcattacatttgtcaaaactcatgaaattttatactttaagatctgtgcatttcactctatgtaaattttaccttagtaaaaaacaaaacaggctgggcgtggtggctcacgcctgtaatcccagcactttgggaagccaaggtgggtggatcacttgtagtcagaggtacgagaccagcctagcaacatggtgaaaccccatttctactaaaaatacaaaagaaattagctgggtgtggtggcaagcgcctgttatcccagctacttaggaggttgaggcaggagaatcgcttgaacctgggagctggaggttgcagtgaactgagatggacccactgcactccagcctaggtgaccgagcgagactccatctcaaaacaaaacaaaacaaaaaatgttagcaacttctaatcccttgacagtttatatataccgcagtgattttctcccacttctcactcacgtgggatcttatcatacagaggttttaaattttaaacaattaaatttatcaaccttcttcatttatggtttctatatttgtgtgtcttgcttcagaaagtatctcttattccaggtaatcatattatcctatttttaaattctattttggaataaatatttcttattccaggcaatcatattattctattttttttctatatttttattgttctttcctgtgtgggacatgtagctggtgggctagctgcagaccacgggcaagtttgctaacattgctaagtcttggttttctcatccataaaatagggataataatttgctttgttattgacatgatttaataaagtaatatttatttgtttatgtatttattttagagacagggtcttactctgttacctaggctgaagtgcagtggcaatctcggttcattgcagctcaagtgatccttctgccttagcctccagagtggctgggactacaggtactgggactacaggatgggactacagagtggctgggcatccagctaacttaaaaatttttttgggctgggtgcagtggttcatgcctgcaatcccagcactttgggaggccgaagagggattaagaggtcaggaatttgagaccaacctggccaagatggtgaaaccccgtctctactgaaaatacaaaaattagccgggcgtggtggcaggcacctgcagtcccatcaggaggctgaggtgggagaatcgcttgaacccgggaggtggaggtggcagtgagccgagattgcgccattgcactccagcctgggctacaagagtgaaactccaccttaaaaaaaaaaaaaaaaagccgggcgcggtggctcacacctgtaatcccagcactttgggaggccgaggcgggcagatcacgaggtcatgagatcgagaccaccctggctaacatggtgaaaccctgtctctactaaaaaatacaaaaaattagctgggtgtggtggcaggcacctgtagtcccagctacttgggagactgaggcaggagaatggtgtgaacccaggaggcggagcttgcagtgagcagagatcatgccaccgcactccagcatgggcaacagagcgagactccgtctcaaaaaaaaatttttttttggccagtcacgatgtgtcacacctgtaatcctagcacttagggaggccaaggcgggtggatcacttgaggtcaggagtttgagaccagcctggccaacatggtgaaaccccgtctctactaaaaatacaaaaattagccagggacagtggcatgcctctgtaatcccagctactcaggagactgaggcaggagaatcacttgaacccaggagttggaggttgcagcgagccgagatcacaccacttcactccagtctgggcgacagagcaagactccatctcaaaaaaaaaaagtctagatggggccgggcagggtggctcacacctgtaatcccagcactttgggagtctgaggcgggtagacggcttgagctcaggagttcgagaccagactgcacaacatggtgagaccccgtctctactaaaaatacaaaaagagagaaaaaaaaatagcttggcatggtggtgcacacttgtggtcccagctacttgggcggatgaagtgggaggattgcttgagcatggtgaggagggaggttgcactgagccaagattgcgccactgcccaccagcctgggtgacagaccaagaccctgtctcaaaaaaaaaaagaaacaaaaaaaaggtggggctcactggctcacacctgtaatcccagcactttgggaagcttaaggtggatggatcacttgaggtcaggagttcgagaccagcctggatgacatggcaaaaccctgtctctactaaaaatacaaaaaaattagctgggcctggtgacgcacgcctgtagtcccagctactagggaggctgaggcaggacaattgtttgaactcaggaggcagaggttgccgtgagctgagatcgcaccactgcactccagcctgggtaaccagagtgaaactctgcctccaaaaaaaaaaaagaagaagaagaaaaaaggtttaggcaaacatgcacttttcctgttgcttttttttttttttttgagatggagtttcgctcttgttgtccaggctggagtgcaatggcgtgatctcggctcactgcaacctccgcctcctgggttcaagcgattctcctgcctcagcctcccaagtagctgagattacaggcatatgccaccacgcccgaataattttgtatttttagtagagatggggtttctccatgttggtcagactagtcttgaactcccaacctcaggtgatcctcccgcctcggcctcccaaagtgctggggttacaggcatgagccactgcgcccagcctgaacatgccagattgtagttccaggaggccagagatcatgaatactttgtccaccactatattcccagcccacagaatacacagcctggcagccaacagatgcttattgaatgaacgagcctcaacagggctttctcattcccacatgccatgctgtggtcaggcttaaatcataacccaacttctgccacctaatatatgtatgaccttggttaaattaaaccagcagtccccaacctttttggcactggggaccagtttcatggaagacaatttttccaccaggggaggaatggtttcgggatgattcaagcacattacatttattttgcactttatttctattattattacattataaggtataataaaataattatacaactcatcataaagtagaatcagtgggatccctgagtttgttttcctgcaactagatagtcccatctgatgttgatgggagacagtgagagatcatcaggcattagattctcataaggagcaacctagatccctcgcatgcgcagttcacaataggattcatgctcctatgataatctaatgccgctactgatctgacaggaagcagagctgaggcggtaatgcaggcaatggggagtagctgtaaatacagatgaagcttctctcaccagccattcacttcctgctgtgcggctcagttcctaacacgtcacggactggtactggccccacggcccaggggttggggacccctgacttaaactaagggccagctttccagaataacatccactttgagggcttgttgagtggattaagtcaaaatgttggtatacttggctggtgcggtggttcacacctgtaatcccagcacttcgtgagtctgaggcgggtggatcacctgaggtcaggaatttgagaccagcctggccaacatgatgaaaccccatctctactaaaaatacaaaaaattaggccgggcgcggtggctcacgcctataatcctagtactttgggaggccaaggcgggtggatcatttgaggtcaggagtttgagatcagcctggccaatatggtgaaaccctgtctctactaataagtacaaaaattagtcaggtgatagtggcgtgtgcctgtaatctcagttactcgggaggctgaggcaggagaatcccttgagcctgagaggcagaggttgaggtgagctgagattgggctgttgttgagttgtaggagttctttatatattatagatattaaccccttataagatatatgatttgatatttcctctcattctgttggttgccttttcactgtcctttcctttttttgtttttgttttttgtggggcagagttttgatcttttgcccaggctggagtgaagtggtgcaatctcagctcactgcaacctccactccccaggttcaagcgattctccagccttagcctccggagtagctgggattataggcgcccggcaccatgcctggctaattttgtacttttagtagagatggggtttcaccatgttggccaggctggtctcaaactcctgacctcaggtgatccacccgcctcggcctcccaaagtgctaggattacaggcttgagccaccgtgcccagcctgttgtgtccttcgatgcacagaaaagactcttttctctactgaacgcccacagcacccttgtcaaaaatcatttgactagtcagggcacagtggctcacgcctgtaatcccagcactttgggaggccgaggcgagaggactgcttgaggtcaggagttcgagacatgcctgggcaacatggcaaatggcaaaaccccgtctctacacacaatgcaaaagttagctgggcatggtgggtggcgtgtgactaccggctgtctcaactacccaggaggctaaggcgggaggatctcttgagcccaagacgtccagactgcagcgagctttgattgtgccactgaactccagcctgggcgatgacagagcaaggctctgtcaaaaaaaaaaaaaaaaaaaaaaaaaaatcggccgggtgtggtggttcacgcttgtaatcccagcactttggggggccgatgcgggcagaccacgaagtcaagagatcaagaccatcccggccaacatggtgaaacctcgtctctactaaaaatacaaaaattagctgggcgtggtggcgtgcgcctgtagtcccagctactcggaaggctgaggcagaagaatagcttgaatccgggaggcggaggttgcagtgagtcgagatcgcgccactacactccagcctggcgacagactgagaccccgtctcaaaaaaaaaaaaaatcatttgtatatgcgaaggttttgtgccacaaacttttgtggctgttgatacaaacgacatggcctctgccttaaggaagccacagtcgaattaaatagattccgtttcaagtagcatctgtcctgtgtgcttagtgggcactgggcccatgttttcccacattttaccctttaagcttctgatccaaccggtgagatagataggatgatcctctttagtagaggggtaagcttagtcccctgagagcgcggctatggcttatgcgagggtacggacagtcaggatttgaacccaaagttcctggctccatgtgtcatgctacctccagtcagatgttctcacctccaaaacttgggcagaagtgaactgagatgctctctactgagcaactcttcagctccagcatcctatacattaaggagtcactaaaagtcagggtccacgagaaaggtgcagatcggggtgcacagaagagcggagtccaaaacaccactcccagccccagtggacagagtcctcaagtggcagccctgcaactctgagcggatgccgagtcctcaccgggaacccgggcgcggctggtctgtgctattggcgcgggtaggggacgcacagcccaaaaatgcccgcgacaagcttctggggcagttctcgccagtctctctggagggagcctacgggttctgcgacgtttctcgcacttgctccctggcctcgctcccgtttccacccctcccacggaggttttcctttctggtggctccttccttgggtgtccctttggtacgcccccaccctggcggtgagctgcgaggctggcgcccgcgtggccactgcgcatgcggacccggccgcggggcggggccgcgcgaggaggagggtcggggacggaagcgcagagcacggaccccgccccctcgcggccccgctcgtgacgtcgcggggggcgccggcctccgcccggccccgaggggtaagagcgagcggctggcggatccgacgcgcgagaccgggaggggacgagggcgttgcaatcgttcggggcgggggctttccggggagggggtgctcaggtgcaccagcggcggcggaccctcagactctgccctcccctccctttaacccccttccagccggacgggaggcggggcagggctgagcatttgtgacacctacatttccgtggctcccttcttttcccccgacccctgtttatctcttcgccttccagaagttcttttccatcaggccgtcgcaccttgcgtgggaaggagcaccccacttggaagcaggaggcggggttcagatcttggccctacccctcctgtgttaaagtccgcgagcctcagtttccctcacagtattttttgcctcgccttacccggttttgaggatctgtacgagaaagagaaaggaagtggacatttgttgaattcctgcatggccaaataccacgcagactgcttcatccgccacgtttaatccttattacttggtgttctcagaactcccatttcatggattcttaagctcacagagtcagtgaataacagaaagggattcagatctagccgtttagctgcacagtggagttcttctccagagtcttcccttgtctgggctctggctggaactattcctcagccaaatcctcgccccagaacagtgcttcctgtttctccagctgagaagtctccctttcagtttccttcttccagcacggagtacactgctctgcctccacttagattacttcagaaatgaaatgcagcaaatatttatccagcagtgcagggagttgaacttttggagtcgggaaccttggattcttgttctggctctgccacttactgtgtggccttgggaagtcctttgtcttctctgagctttcttttctctttgcgtaaaagcggtgctcttgtcccattctccctccctgtcttccagcaggctctccccggaggctcagccccctctgctccccatgggcaactgccaggcagggcacaacctgcacctgtgtctggcccaccacccacctctggtctgtgccactttgatcctgctgctccttggcctctctggcctgggccttggcagcttcctcctcacccacaggactggcctgcgcagccctgacatcccccaggtaagttccccacccccgtacccgctcttccttccaacctagacaggcttttgctgctaatctcatctcacccgtcttcttttgctcacaggactgggtctcttttttgagatcttttggccagctgaccctgtgtcccaggaatgggacagtcacagggaagtggcgagggtctcacgtcgtgggcttgctgaccaccttgaacttcggagacggtccagacaggaacaagacccggacattccaggccacagtcctgggaagtcagatgggattgaaaggtgagatcagaggctgggtgtggtggctcacgcctgtaatcccaacactttgggaggctaaggtaggtggatcatttgaggtcaggagttcaagaccagcctggccaacatgatgaaacaccatctctactaaaaatacaaaaattagccaggcatggtggcaggcgcctctaatcccaactactcgggaggctgaggaaggagaatcgcttgaacccaggagatggaggttgcagtgaaccgagatcgcaccattgcactccagcctgggtgacagagcaagactctgtctcaaaaaaaaaaaaaaaaaaaatcaggtgcggtggctcatgcctgtaatcccagcactttgggagtccgagaagggcagatcacgaggttaggagttcgagaccagcctggccaacatggtgaaaccccgtctctactagaaatacaaaaattaacctggtggtctggttgcggtggcccacagcggtaatcccagcagtttgggaggccgaggcgggcagatcatgaggtcaggagtttgagtccagcctgaccaacatggtgaaaccccatctctactaaaaatacaaaaattagccgggcatggttgcacgtgcctgtaatcccagctactcaggaggctgaggcaggagaatcacttgaagccaggaggcggaggttgcagtgagccgagatcgtaccactgcactccatcctgggcaacagagcaaaactcggtctcaaaaaaaaaaattagccaggcttggtggtgcaagcctgtagttccagctacttgggaggctgaggcaggagaattgcttgaacccgggaggtggaggttgcagtgagccaagatcgtgccactgtactccagcctgggagacagagcaagactccgtctcaaacaaacaaacaaacaaaaatacaaaaagtagccaggtgtggtggcaggtgcctgtagtcccagctacttgggaggctgaggcaggagaatcgcttgaacctgggaggcggaggttgcaataagcagagatcacaccactgcactctagcctgggcaacagagactctgtcccgccccgcgccccccccaccaccctgcgccaaaaaaaaaaaagtaaggtgagatcacagaggactgtggggtcgggtatcagaacactcagggctgggccctgcctctgacctcaccaatgatgaccttgggcacatccctggactttagtcacttctgtgattagggctttcagtgaacatgctgccgacagggtaggttttctatgaatgctttcttcctctgccagttctgatgttctttgagtctatccttggaggtaggatgaaatgggctaggtttgacctaatgttttctcatcctttagccacctcctcctagaggcccctttttccttagcatagttctgtatgccacaaaagatgcagaaaaaaattagacaccatcaatttccaaagagctatagtcttctgggaaaatgacaagcgatagggagaatgtgaaaatgtcagtggatgccaataatccctgtgtgacatttggccttatctaaaatatgctaagataaagagggatggaagagggtggtattttctgacttctgaggtcctttacaacactatcattctaagattctcctgtgagtatatatgtgtcgggggagtgggtctctgcatgtccagatgtacatgtatgttaacaaaaataaggaatgtgtccgatatatgcagacttgggacaattctttcccattctttttacttttaaatagatatataatagttttattgagatatgattcatgtaccatacaattcacccattgaaagtgtacagttagggccggatgtggtggctcatgcctgtaatcccagcactttgggaggccaaggcaggcagattgcttgagcgcaggtgttcgagaccagcctggacaaaatggcaagactctgtctctactaaaaatacaaaaaaaaaaaaaaaaaaaagccaggcgtggtggtgcacacctgtggtcccagctacttgggaggctaaggtgggaggattgcttatccctgggaggcagggcttgcagtaaacattctcctgcctcagcctcctgagtagctgggattacaggtgctcgccatcacgctcacctaattcccgccccccagcccaaggagtcttgctctgtcacccagactggagggcagtgatgcgatctcagctcactgaacctctgcctcccagtttcaggagattctcctgcctcagtctcccaagtagctgggattacaggcatgtggcaccatgcccagctaatttttgtatttttagtagagatggggtttcaccatgttggccaggctggtcttgaactcctgacctcatgatccgcccgccttggcctcccaaagtgctgggattacaggtgtgagccactgcgcctggccaatttttgtattttttatagagatgtggtctcactatgttgcccaggctagtttcaaactactgggctcaagtgatcctcctgcctcacctcccaaagtgctgggattacaggcatgagctaccgggtctggcgtattacccaattgttttatttactttctcttgattgctagtaaggttgagcctcttatggtttattgtctgtattcatgttgcctgtgaattacctgtttgtttcctttgttcctttttcttttaagttatttgtctttttcttcttgatttgtaggtctttattctagatagtaaaccttttgtcatttaaatatattataggtattttcaatatgttacttgtttttttaacttatctttcattgcatagaagtctttaatttttatgaggttaggtttatcactcttgtcctttattaaaacttttaggttttgtgtctttcataggaagcccttcctcattttaaaattagaaaatattctggccaggcgtggtggctcattcctataatcccagcctttggaaggctgaggcaggtggatcacctgaggtcaggagttcaagactggcctggccaacatgatgaaaccccgtctctactaaaaatacaaaaaattagccaggcatggtcgtgggcacctgtaatcccagctactcacaaggctgaggcaggagaattgcttaaacctaggaggtggaggttgcagtgagctgagattgcaccactgcactccagcctgggcaacaagagtgaaactctgtctcaaaaataataaaataaaataaaataaaataaaatattctgtattttctttaaatacttaagtttttttttagtttgtatagttctttaatacatctgaactttattttataagataacagtttgacgctatgtttttttctacatggaaattttcccaaggccatttactgaggccatcctttccccactaatttaaaatagggtgagaaccttttaatggattttggtaccaagtgagaaactgctttcttaaaaagaatgaactagtttatgcaaactgacatgggcaatgtgtatctgcccatttcactgcagccttgcgagtattagtatggttgttgtattgattgtaatttaagttaatttaaattacaacttaatttgtgtttatattgatacaaagttattttcatttctcagtgatataaataatggtatatggaatactttattgaatagaatcaatgccaaaacacctggtattatagaaagccttaaaaaatgactaggggcaggcgtggtggttcatgcctggaatcccaacattttgggaggtcagggtagcaggatggcttgagcccaggagtttgagtccagcccgggcaatacagtgataccctgtctctacaaaaaaatttttttaaattagccaggtaggtggcacacacttgtagccctgcctactcaggagactgaggtgggaggatcacttgagcctaggaggttgaggctcccgtgagctgggatcgtgccactgcactccaacctgcacgacaaagtgagaccccatctcaaaaaaataaagaaagaaagaaaatacaagaaaagggccgggcacggtggctcacgcctgtaatcccagcactttgggaggccaaggcgggcggatcacgaggtcaggagatcaagaccatcctggctaccacagtgaaaccccgtctctactaaaaatacaaaaaattagctgggcctggtggtgggcacctgtagtcccagctactcgggagactgaggcaggagaatggtgtgaacccgggaggcggagcttgcagtgagccgagattgcgccactgcactccagcctgggtgatagagcgagactccgcctcaaaaaaaaaaaaagaaaatacaagaaaagaagcgtgaagacagaggctcccgcgtcacctctcattttcttccattttctcttctgtgcctttcacaggatcttctgcaggacaactggtccttatcacagccagggtgaccacagaaaggactgcaggaacctgcctatattttagtgctgttccaggaatcctaccctccagccagccacccatatcctgctcagaggagggggctggaaatgccaccctgagccctagaatgggtgaggaatgtgttagtgtctggagccatgaaggccttgtgctgaccaagctgctcacctcggtaagagcctcagatgggtcgccagggttttgtagactgcctgctgactactgtatcttgaaggtccctggaaacaattctaccttgtagaaaaagcacaggttttataaccctgccttgggggctgtgtgacgtagaacaagtgtctaaacatctctgagtgtcagcatcctcatctgtaaaacagaaaacatgaccctatctcttaattccatcaaataaggattaaatgagaatgaccgtgaagtgcccagcacattgcctgggacatagagatttgataagtgacagctattgttgtttactattgtctttaaaacattctctctacttcaaaggagttcagaagctataataagaggcaaatgggctaattgctattagagagatgtgagcaaagtgttatgcaaacacagagaaaggagccattaaccctaacttgaacatttatggagagtgcatcacagagaaggtggcatttaccagagagcattgtgcacagtggtttataatgcacaaagtgctctcagggttcattaattcatttgatcttaaaatagccttttgaggtaggtgttattatcccattttacagatgaggaaacaggtttagagaaagggagtgaattgctgcaggccacacaactggttaagtggcagagccagggttgcaacccacaccttctgtcaagtcagaatgatccttgaagaatgaggaagatttggacagggactgcagtagaggaggttcaggagagggggaggtacactccaggcaaaggcaccagcatgcgcacaggcctagagattgaaaagtgttcagccaggtgtcacatctgtaatcccagcactttggaaggccgaagcaaggagaatgcctgaggccaggagttccagaccagcctggagaacatagcaagacctcgtttctttttcgcttttttttttttttttttttttgagacggagtctcactctgttacccaggctggggtgcagtggcacaatctcggctcactgcaagctccacctcacaggttcatgccattctcctgcctcaggctcccgagtagctgggactacaggcgcctgccaccatgcccggctaatttttgtatttttagtagagacagggtttcaccttgttagccaggatgatctcaatctcctgacctcgtgatccacccacctcagcctcccaaagtgctgggattacaggtgtgagccactgcgcctggcgaccccatttcttaaaaaaaacatttttttttttaattagcagggtgtggtggtacacacctatagtcccagctactcaggaggctgaggtgggaggatcctttgatcccaggagtttgaggctgcagtgagccatgattgtgccactgcactccagcctggttgccagagtgagaccctgtctcaagaaggaaaaaaaaagaaagtgttcagcctttgggagcactccatgttgagaggcttaggaaggagaaaaggcaagagagaccacagggatttgatggagaggctctgtgaatgcaggatagagggctatgacctgatgctgaaggccgtgggggccactgaggagttttaaggaggagagagatgtgcttccctggtgctgggtggagaatggctgagtggaggagggccatcagtcaggaggctgctgcacactccactctcacatttgaaaataccccatgaggcacggtggctcacgcctgtaatcccagcactttgggaggccaaggccggtggatcacttgaggtcaggaccagcctggccaacatggtgaaaccccatctctactaaaaatttaaaaattagctggatgttgtggcgggcgtctgtgatcccagctactcaggaggctgaggcaggagaatctctggaacctgggaggcagaggttgtagtgagctgagatcatgccactgcactccagcctgggcaacagagtgagactccgtctcaaataaagaaaaaaagaaaagaccccatgaggagcacaacctgggacttggaatcagagatctggtttccagatctagcactgcttgcactttttttttttttttttttgagatggagtcttgctctatcgcccaggcgggagtgcagtggcgcaatctcagcttactgcaagctccgcctcccaggttcacgccattctcctgcctcagcctcccaagtagctgggactacaggcgcccgccaccatgcccggctaagtttttgtatttttagtagagatggggtttcactgtgttagccaggatggtctcaatctcctgacctcgtgatccacccacctcggcctctcaaagtgctgggattacaggtgtgagccaccgcacccagccacttatacatctttaaactgtggatcataatgaagtttcctatctcatggagttatgatggggtttcaggttgataattgggcaagaaagtagtttttaaaccatcaagacaaatgttcgagcctgggcaacatggtgaaaccccatctctacaaaaaaacacacaaaaaattagctgggcgtggtggcacacacctgtggtcccagctactcaggaggctgaggtgggaagatcgctggagcccaggaggcggaggttgcagtgagccgagattgcactactgcactccagcctgagttacagagtgagaccctgcctcaaaaagaaaaaaaaaaaaaagggccaggcgcggtgtttcacgcctgtaatcccagcactttgggaggccgaggtgggcggatcatgaggtcaggagatcaagaccatcctggctaacacggtgaaaccccgtctctactaaaaatacaaaaaatgagccaggcgtggtggcgggcacctgtagtcccagctacttgggaggctgaggcaggagaatggcgtgaacccaggaggcggagcttgcagtgagctgagatcgcgccactgcactctagcctgggcgacagagcaagactccatctcaaaaaaaaaaaaaaaagacaaatgtcagcttatatgaaaataacattttcccttcagttgctccctagatgtggagagccctctccctcatggaggctccttctatagcccttggactggattaacatgtcctcctcctcctctccctgtacccctccctaggaggagctggctctgtgtggctccaggctgctggtcttgggctccttcctgcttctcttctgtggccttctctgctgtgtcactgctatgtgcttccacccgcgccgggagtcccactggtctagaacccggctctgagggcactggcctagttcccgacttgtttctcaggtgaggttctttgctccagtcctgcgggagcagggaatggggtgggggtgggggttgtaaccggggtagagcagatccttggacttttcctcaaagactgctgcttctgagtccccgagaacctcttcaaccacagctctcccttagggactgggaacaatttgacaccgtcagcattcaatatttttctaattactttaacttttttattataaaatagttaacacttatgtagaaaagtccaatagtataaaaggacagcttggcaaattattataaagtggatacttataaataccactgagtagaatattaccagctgtccagaaaccccccatggtcccttccttcctgacaatgccctctctctccctagaaattactgtcctgctttataatgtattgccatgtatgtattcctaaataatatagtttggttttacttatttttgaaactatgtagacagaatcatacacattcttttgtggctgacttctttcaagcaacattgtgattttaagactcataactagttcacatccaagcatttgggtaacaatggtgagttaagagggttcacatttgatgatttgtcctgaatatgaaccatgtttgtcttgcttttgtcctgaaattccaatacccagttttatgatggaaattttgtaaaattcaacttgaaccgctcagaagagtctaactgatgatactcatttactggggacatagtatgtgcccaagaacttgacatgcaccttctgtcttccatttagtcatcgttacctttagaaaaagctgattccgttaacaagatctttggagggaatcagcttcacaaacgtagcagtgggtgggggtcatgttggttaaccagttcacacatcagctcactaaaggaaaaaatatttctgcaaaaaatcttcacttgtcagaggggggtgcatgaaatttgagagccatgtgttatgcatccagctcttgaactggtctcagcttcagctggctgcagtgccctaggaagttactatgggaaaagtggaaatagttgaggcccagggaactgatcaggccagaggaagtggaagctcaagatcaactgtgcttattttgctgatggctgggcctaaatgccccaaccacctacttgggacaggaaatgacaggaccctctcaaccttggactgggaaaggagggcttcctggcccctgacagaccctggggtcctgaggctaccttagttgggattaaatgcccgtattggtctctagctgtcactccctctgctccttcctcaatttctgcacacatctcagagcttcctctagcagctcttcgacctgttttgttgttttattttctttctccccaggtgtgaatcaacttcttgggccttggctctgagttggaaaaggttttagaaaaagtgaagagctggaatgtgggggaaaataaaaagcttttttgcccagtggcgtgtatggtgtttattgggggttggattgaggtggggattttagggtaggcaggcttagaagttttgggggactctttcctgttgactctctagtttggacacaggttggcatagggcataggttacttgagctctccccatggttgacttggctttggtaaacacctgtcttgttttcttctacgaaataaaatggataattacagttagttgggcgggtggggtgtcaggtcatggaaatgctgtgacataaatgcactgtgaccttggcaagtcttgcaacctgcagcgcctcaatttccgtaagagatttgaccgattgagttttcccagcgtcgacgcgcaaagattcctcgcacttggaggcccttttccaggttagatggttgctaacctcggagcagtctattttcccgccttttccgcgcccagcagcagcttcctttgcccctcccaacttccaccctgcgcgcagtcgcagatcgccgctgctgtccgtccacccgcgccccctcaaagcttcccctagcaacaagctcgggctcagagcgaaggcggggcgagcgcatgcgctgcagctctgtccaccgccagtcgtgggacagagtgccgggctcctccccttgcaagtctagctcttctccccgcctcctccggcctggggtccgcgtggcggggcgggcgcgcactcgggcttggcggctgccggtctcccaggccgcggcagtgaggagagagggcggggctgagtcctctgcgcccccgccccctttagcccggcgtccctaccgcgcctgcgcgctcccgcccggtctccatcttggaattgggaggaagagggagagggagaccgggacgagaccggggctgtggtgcggagagaggctgagacggagaagaggagaggcagagagggcgcggggaccgtcagcagcaccttagctacaatcgttcagctattctcggaagagagaagggagagggaggaggccggggcgggagtgggggctgtcaccctcggaccccggcgtgagaggggccgtgcggccggacgtcctcggggtgggcccccagtcggtggccgaagacctacagctcaggcccctgggtcccaaatttccaggctttgcccctcctcctttctcagatacccgggtaacagtcctcatagtccagatatccgggactcgggtcccaacctctctaaacctgggtctctgtttcatagaatttcaaatatcaggttcaggcccctgcgtgcaccagtatccggggttcattccccgggcgttcaaatatcggattcagtctccatcccgttcagatattcggggttcagaccccacaatcagaaatccggaattcggcagctgtcgccctcgacgagggggaggactggaccgcgaggtcagattaggttgtcaccccctcccctccaggggaggcttcccgggcccgcccctcaggaagggcgaaagccgaggaagaggtggcaaggggaaaggtctccttgcccctctccctgcttggcagagccgctggaggaccccaggcggaagcggaggcgctggggcaccatagtgacccctaccaggtgagacacggggtgcaggggcgcgggtccctgtgtctagttctgagaagaaagggtgcgcctttctgagaagctggacttgggtaggccctctcaggatggggaagcccagctgagcgagtggtcagcctctggctagccttgccttctgttgccacccccttccccttcctcttcccttcattgtgtctggttggtgggggacctcaggtgacagggtctctgatgtcaccggcgttcacaccctagggtgcttcagctaatcagatggatttgcacttcagtcttctctccttcactttgcccctcacagccacctctcctccctgatatgtcccgttctcctggctattctgtggttttgattcccatgcctctgattcccatggtgggtctgcttatctgcttttcaggcctggtctggttggatttcttgtccttgcaaggaagtgtgtgtatatgtgtttgtgtgtatgcgtgtgtgtgtgtgcttggaggtgcctggcaatgttttcccccagctgcagttaccttccaacctcttgctgtgatggtgtcaataatctcatccatttgtcaaacgatctgtcttttacaaagtgctttgacagccattctctcatgtgacatccccgcattcaccctgtgggggcctcttttattggcatcttcccattttacagttgagaacgttgaggccgagagaggttgcccaaggtcacacagtggcagaaccagaatttgaactcaagtcctcaatcacatctttccctgatgcatgcctggttcttgccatctcttttcctctgagtttgggctcggccaggggtccctaggagtccaggctggggtgaggtttaagaatggggatgagatgagcttcctttccaggagggctctactcagaagcttttcctgatgggagcctctggcttttgcctctgcctcatggagttttctatccactgtgaccttcatctttaccccaatcccagggtttggcctggattcctgagagggctctctcctgacaaatggtagcactagtggcatcttttaactgttcaagccaagctgttggggtagaatgatcccccaaaggattaaagctttgtggggaccttggaggcagggaaggaaaaatccatatgctgagtgtctgcatggtgttcctaagtatgagatctcattaaaatcttaacaacagctccatgctgtaatccatttcactgaagagaagaccaagaactggaaggaacttatttaaagccctgttgctgtacattgcagacgggatgtactggtagcatagcttaggaacagatagatacgggtttcctcatctgtagaatggagataacattgttcgttttggaaggtggttatgatttagcacagaccttggttattgttcaagtgtttgttgttattatggggaaggggacctgcatgatgttttgccagtgggtggcacccctccgtgtggcctaggttagcattctggggccttgtgttggtaaagaggtcaggaagattcctttggcaagttgagagcacctgcctttgtgtgtgggtgtgtggtgctggtgaggggtgcttggcactgttgctggcagaagggagaaaagggccggctttgagcaacctgcgagctgctgagggctgagcagagagcaatcactcagtctcccaggctattctgagccctctgcaccctgggggcccactggagagtcaggctccctccttgccctccagcttccagttgggctgagacaaaattaacaacacaacaggaaacaatgcatgacagaataaattacatgctaaaattgttaggtgcttttgagtagctagaactctgccccaggagtccagctctgctgaaggctcctttgtgcctaaattctgacaagtgcttaggctggagcctgtcttggaatctccttgagggttttggttctggtatcctgcaggaactttctccgggtgtttggttgggtgccctaggtgctcttcccaatggctggagtggtcaggacaggcttcctgcaagaggggagctgagcttggggtgacagctgagagagtaatggatacaggcctaaccggggagccgaaggtcctgttctctgaccttggagaagtcctttttcttctctgtgcctcagtgacctcacctaggaaatggtgatcatgattctgccctgcctgtttcgaagggctgctctgaaatcatagtgatggaggaccagctttggacaaggcacttaaccttgctgagcctgtttctttatctgtaagataggggaaatcatagtacttgcttcataaggttgtagtgaggactgaatagagataatgcacgtaaggtactcagtaaatgttatttgtaccctgcaaatgtcctgtacctgtgtgtgatgcttatgcagttggacaggacaagtaaggtggcccagagcacagagaggccctcatagccagatgccatttatatccctattcttcccattctagatctccccctgacttttttgagagtgactttgcgggctcctctgggccagtacccacttctaacaatggacggatttccaccgcctccggcctggccatttcctgttctcttccagggtgtgagaggttgagggaggagggggcctcagcgccaaggggaacagaaaggtgcctggaaacagttggggtataggacttatgggacaggacacttggggctctggagtgctggctgggaagcagaatgttttatccttgaggggagatacaggggctatagggaaatgagaacttgttgagcactgaagggggtggtgaggatacttagcttcccagaatcttcctagcagttttagggactccagggacccagcccgcgtgatctggttgccagggcaacttcattttttggagctttgatgttgttcctaatctccccctccccttcctcagcagtgcctcctcctcatcagggaatgaggggaggagatggcagaaacttgatgggtcccttcctctccctgaaggctcaatccttgatctctaagggtcccatttccattcctcaggccaggccccactctcagggcccccaggggccaccatgccagctgggggccgggccgggagcctgaaggacccagatgtggctgagctcttcttcaaggatgacccagaaaagctcttctctgacctccgggaaattggccatggcagctttggagccgtatactttgtgagttgggtcttgggagggtgtaatagggatggggactcttcctatccctgtggacttcccaacagcccttgcacactactccatcacactggtctttcctgccttctcttgctgggccagcaagtcttcccatgcccggctctcaatggggccttcaacaccttctggtctggtcctctaggcccgggatgtccggaatagtgaggtggtggccatcaagaagatgtcctacagtgggaagcagtccaatgaggtgggccaggtgcaatacagccaggttggggacaggggactcctgtctcaagatgcaagctgggtaacctctgcctaccctgaccccctagaaatggcaagacatcatcaaggaggtgcggttcttacagaagctccggcatcccaacaccattcagtaccggggctgttacctgagggagcacacggcttgggtgagctggtgccagattctggcctgatctttactcctattcatgcccgtccttatcgtagtccagtctcttaggtggtccctgttcgtggtgctgttgtgggatcttgggaaggaggaagtctcttttgaccgctttagtcctcagacatacccactgagcaaaagcctggctcagtgacacaggctgttagcaggtgggacaggtcactgtgggctggagaaggtggagattgaatgggagtttgaagggattcagatgggcagtggtgaatgtcttgggcccagactctagaaactctcccaccaccccctcattgtctccagttgcgcttcctccctgtcatcaccccggggacatagcttgagtacaggacagtcaaggaagctctgttttgagtccctgcccaggagactctgatctctgacccttgtctcttccttagctggtaatggagtattgcctgggctcagcttctgaccttctagaaggtaagtgactgataggccaataagtggagaagggagaagagcaggggagccatagggaagggttaaggggagtttattccagtcccacccttgcgctccctcgggttgatgttcttcctcactctccagtgcacaagaaaccccttcaggaggtagagatcgcagctgtgacccacggggcgcttcagggcctggcatatctgcactcccacaacatgatccataggtacaagcagcaccggcagtgcctgggaggggagtgctatctgcaccacctgtcacttagctgggctgcccctgcctagctttcttgagacacatgtctcatccctgtactttgcctctggcagggatgtgaaggctggaaacatcctgctgtcagagccagggttagtgaagctaggggactttggttctgcgtccatcatggcacctgccaactccttcgtgggcaccccatactggtgagtgagtgagtggtggtgagtggagagacctcccagggatgttgggagtaggagtgacagggtctcggcgggtgatttgcctctctctcctgaccattctcctaggatggcacccgaggtgatcctggccatggatgaggggcagtacgatggcaaagtggacgtctggtccttggggataacctgcatcgagctgggtaagaacatcctccctgttccctcatcatcttttccattctttcctgttagttcccagactccggactacccccttctcctagggatgggatcccaggcctccaagttcctgtccgttgtgactctaccctggagcccaatacaggcagctggcaaattctgccagctcttaggcctagagattttgtagcattcatctcttcctgtccactaccctggttctgaatcttttcttagtgcccaccatgtgctgtgccatggactgtgattctggagggatagcagtgaatgaaaatcctgccctcatggaacttacatttgatttagggaaaccaggcaggcatgttttctttcaatgtgatgaacgctgtgtggagaagttacaggagcggttcaaatgtaaaacaggggacttgacctagtttaggggctgaagaaggcctccttgtaggagaatattgaagccaacctgcaagataaataatagctgtttgcagaatgtagggaagagctttccaggcagagagaacagcatgtgagaggcctagaggtaagtgcaggcctggggaactgggactagcttcagttatttggaacctagcatgtaatgcagagaatattgaaggataaggccagagagttaggtccaagtgagttcctaaggccttgaagccatgccaaggttctcatctctgtcagccagcactattgaaacaattctttaatgaggtaggtaacctttataaggcttccaacacaatgccaggcacaaaacagttgcctaagagttgctgttagtttctcttatcaacagcctcctgcagtgatctctccagtctcttctcccttccagtctgtcttaagtactgatgccagagaggtctgcctaagctcagtgctgtcatttcactccctgtttggagccatgagtggccccctgttgccttcaagactgaagccatccccatccttcctcccaccaacctagaggctttgcttcgtaaatgctggccctttccttcatgggctccaccctctgagtgtgtcatgaactcttccacttccttgccttggttcgtattgggtcctctgcccgaggtcagagatttggacgagcccttctcctccatcttcacagtctccatttaccattagatgccaggcccagacagttgatgaaaaatgtaagaaacggacccaagtataagaaaaagctagatctgtccattttatttctagtttttggaagagatgtggatacagagaaatattactctactattgaaaaaaatatatatcagtctgattataaatgtcaactcatactaagtcaatatcagggaagcagtgtggagaaggatgtggcaaactggagattgctgtttccatagaaagagggcagctaatgcttatctccagaccattgttatgcagtaatgtagactccatttcaccagatttaattcttaaggagaaactggaaacttgtattattatttgattattacttttggcagttaattttaaaaatcaccgtttaggccaaaacaacatgacatttgtctgggctacaagggactcttagcgactcttagcttgcacttacctttctaatctcagggctttttacaaagcccttctctgaattccctgaagatatgctagcttgaaggctcactgcatactctcaacttcccagccacttccctgtttccctcttataccagttaatactttgatgttattttttcagtcctatttaatcttttagactggaggttccttgagggtggggcctaattcttgtttttatcttccccatagcaattatcaagttatctgctccctttggcacctaagaaatattagttggggtgataactgaatggctgtccttctgccttcgttactgcttttgtggatgttattttctttgacccctattccacccgtgtgcagtggagaggatgggtgttgtattttacagaggaaggaattaactgagacgcaacaggatgatgggaacttctcaaggtcatgtggcaaggaagtcaaggaattggggtttgaacccaagtcgtctcagttccattccattgtcctctaccccctgccacctctcaccttcttccctttcacctttttctgtagctgaacggaaaccaccgctctttaacatgaatgcgatgagtgccttataccacattgcacagaacgaatcccccgtgctccagtcaggacactggtgaggactgagattccgaatctgggcccaggcgttaggccatggggtatggatgcctgactcatgccttccccacccctctcccaccctcctgtgactttcaggtctgagtacttccggaattttgtcgactcctgtcttcagaaaatccctcaagacagaccaacctcagaggttctcctgaaggtgagggcctgctggcctagcattctcctggaactgtagcttgttacagccacaagaacccccagggaaattagtggttcccagttcctcctccaccaagagcttcgttgatgaattcccaccccatccccaatgcctagtggactctgtgttttacaagattttgtctaccagactgccttaatttattaagtaataaactgttttcccttcttttattaatcaaagatttatataattgccagccagagcttctggtcagcatgtgataaccagggttgccccactgatctgatgtaatgcaagccaaaagcctgtgtagccttatcatgggtaaatgtatgatttcccttaggtgttttttgaattatcaaaaatggaggggccccattcccttcacagacccatgggggcctgaggagccgtagttggaaacttcagattatgtagttggacccacttgttttataattgtaggatactgtatgaagcccagaggggcctcatgacatgtccaaggtcacatagccctttagtagaggagctggacgagaatccagttctcctgactgtccctgcctgtcagccatgcttagaggaagaagagtctgtctggggagtaggtactgggtggtacagaaaattgtgagagaagggcttgggataaggccagcatcaacccgtggtgggcgtgggccccagaagagtgcctcaggcctgagggaatgccaagggctgtgggttgtggggggaaggggagttggcagcagacctcagtgccctcttcccccagcaccgctttgtgctccgggagcggccacccacagtcatcatggacctgatccagaggaccaaggatgccgtgcgggagctggacaacctgcagtaccgcaagatgaagaagatcctgttccaagaggcacccaacggccctggtgccgaggccccagaggaggaagaggtgacccagcttgccctaacacccctctttataccccatgtgtgcctgccccctgcagttgcttggccccttccccagccctactcacaccaccatcttcccatgctacctccatgcatatgccccagggcttccccttccctgtccagcagcctacgccctgttcgcaggaggccgagccctacatgcaccgggccgggactctgaccagcctcgagagtagccactcagtgcccagcatgtccatcagcgcctccagccagagcagctccgtcaacagcctagcagatgcctcagacaacgaggaagaggaggaggaggaggaggaagaggaggaggaggaagaaggccctgaagcccgggagatggccatgatgcaggagggggagcacacagtcacctctcacagctccattatccaccggctgccggtacacagctcacccttgggggacccgagccacctgctctagaactgcctgggtcttcgccctccttccctaagtgcagcactcctctgagtctgattggctgtcctcaggtagctctctttggacccagtggcctctgagccttgggtgttccttctatctccctctagggctctgacaacctatatgatgacccctaccagccagagataacccccagccctctccagccgcctgcagccccagctcccacttccaccacctcttccgcccgccgccgggcctactgccgtaaccgagaccactttgccaccatccgaaccgcctccctggtgagtgtagccatcctcactcagcctgctcgctgtctgttttttaagtctttttaagtctagaaatgatttcctccctgtggcatgggattgagtctggattctaccctcattttctgttgctggctcctgcctgctccccttaaccctcctgcttccctcctcttcccagtggactgttttggtcatatggcccaatctgggtgtttctagcttggcaaactcttactccgtttttgtggcctgacttaactgacatctcctgggttgccttcccaggctcctctggtgagtcagatgcttcacagttgtgtgctggggaagcccagtgctgggggagccctgtgcctgtggagccctgtgctgggggtgtccagtgctggggagccctgtgccgggggtgccctgtgcttgggtggtcctgaacagcatcatgataggtttgccagattctgtgccccagagggcagggatggtgttcagatatctgtctcatgccagcagttagctctcaggcttacacacaggcctgtgttaaccctcccagcccccctgggaggggaagggtaagatcccattggagaaatgaggcacctgtggctcagaggggccacttgccccagtgcctttggtggctctctgctcctgtaagcaggcccttagtcctctcctaaaatcaactcatggcagtctttctcagttcacaggaaaaagtgtttaggcttttcataaaacatagtttttcatctatgtttttagatcacgttcctgctgagctgcatttgagcgtcaacaatccccttagaggccactgattaagtctagtatgttcttatggcctctgcttggtgctggttgtgttccaacaattcttcagatcccatggtgttgtgcggtactgtgctgagaggtcttgactgccaggggcttggctgccgggactagtttgagagccactcatagagtcaattgagaatgagacctgagatcagactttggatgaaggtgtccaagcccagtgttcttgttattccagcatcttgtggccccgatcccacctcaatacctggggagtgataggccgaccatgtttgctgaaggggaaggaagccaacacttattagatagagtccgaacttaccccacagcccctatgaggaggtattatttccccatttaacagatgagggaactggtgctttgagaagttaacttacttgagatcacatgcttggtaagtggcaaagctgggatttgatcccaggtatgtctgactcactgtttcaaattagtatggattgttcctacttttgtgccaggccctgtgctcgccaccttttatcattcggccacaccaacttgtgatgtagataatatcaccattatccagttgaggaaacaggctagagtggccgtgtgtgaggaaggtgttaaatgagaatgaaacccatgagttgaaaacccatgctcttccccacggaagaccccttgtgttaattaactaggggccaggctgagccccagctctcaccctctctccttccccaggtcagccgtcagatccaggagcatgagcaggactctgcgctgcgggagcagctgagcggctataagcggatgcgacgacagcaccagaagcagctgctggccctggagtcacggctgaggggtgaacgggaggagcacagtgcacggctgcagcgggagcttgaggcgcagcgggctggctttggggcagaggcagaaaagctggcccggcggcaccaggccataggtgagaaggaggcacgagctgcccaggccgaggagcggaagttccagcagcacatccttgggcagcagaagaaggagctggctgccctgctggaggcacagaagcggacctacaaacttcgcaaggaacagctgaaggaggtgagctagggctgcttgggggcggagccgatggcgagccaggtgggtcctgaccctgcttccctctgcactcgcccaggagctccaggagaaccccagcactcccaagcgggagaaggccgagtggctgctgcggcagaaggagcagctccagcagtgccaggcggaggaggaagcagggctgctgcggcggcagcgccagtactttgagctgcagtgtcgccagtacaagcgcaagatgttgctggctcggcacagcctggaccaggacctgctgcgggaggtaggcatcccaatctctgttcccctcccgctcactcgtggatcccagggacccacccttttccattttcctcattcttgtcttctttctccttggccctcgagtgttacagttcagctttgcttcagtgccccttttacttctcatccccaacagaccctgccagaatttccttaggcctcttttcccaggccagggaggagcttgcctcccctacaccctcatctcctgccatccccagctccctctgccaaggagccctggcccctcacttccttgatactgaccaggccctgggccctgtgtttcttccgccatccccagctccctctgccaaggagccctggcctctcacttccttgatactgaccaggccccgggccctgcatttcttctgcctcaggacctgaacaagaagcagacccagaaggacttggagtgtgcactgctgcttcggcagcacgaggccacgcgggagctggagctgcggcagctccaggccgtgcagcgcacgcgggctgagctcacccgcctgcagcaccagacggagctgggcaaccagctggagtacaacaagcggcgtgagcaagagttgcggcagaagcatgcggcccaggttcgccagcagcccaagagcctcaaagtacgtgcaggccagcgccccccgggccttccactccccattcctggggctctgggcccacccaacacaggcacccctatagaacagcagccctgctcacctggccaggaggcagtcctggaccaaagaatgcttggcgaggaggaggaagcagttggagagagaaggattctgggaaaggaaggggccactttggagcccaagcagcagaggattctgggggaagaatcaggagcccctagtcccagtccacaaaaacatgggagcctggttgatgaggaagtttggggtctgcctgaggagatagaggagcttagggtgccctcccttgtaccccaggagaggagcattgttggccaggaggaggctgggacatggagcttgtgggggaaggaggatgagagtcttctggatgaggagtttgagcttggctgggtccagggcccagcactgactcccgtccctgaggaggaggaagaagaggaagagggggctccgattgggacccctagggatcctggagatggttgtccttcccccgacatccctcctgaaccccctccaacacacctgaggccctgccctgccagccagctccctggactcctgtcccatggcctcctggccggcctctcctttgcagtggggtcctcctctggcctcctgcccctcctgctgctgctgctgcttccattgctggcagcccagggtgggggtggcctgcaggcagcgctgctggcccttgaggtggggctggtgggtctgggggcctcctacctgctcctttgtacagccctgcacctgccctccagtcttttcctactcctggcccagggtaccgcactgggggccgtcctgggcctgagctggcgccgaggcctcatgggtgttcccctgggccttggagctgcctggctcttagcttggccaggcctagctctacctctggtggctatggcagcggggggcagatgggtgcggcagcagggcccccgggtgcgccggggcatatctcgactctggttgcgggttctgctgcgcctgtcacccatggccttccgggccctgcagggctgtggggctgtgggggaccggggtctgtttgcactgtaccccaaaaccaacaaggatggcttccgcagccgcctgcccgtccctgggccccggcggcgtaatccccgcaccacccaacacccattagctctgttggcaagggtctgggtcctgtgcaagggctggaactggcgtctggcacgggccagccagggtttagcatcccacttgcccccgtgggccatccacacactggccagctggggcctgcttcggggtgaacggcccacccgaatcccccggctactaccacgcagccagcgccagctagggccccctgcctcccgccagccactgccagggactctagccgggcggaggtcacgcacccgccagtcccgggccctgcccccctggaggtagctgactccagcccttccagcccaaatctagagcattgagcactttatctcccacgactcagtgaagtttctccagtccctagtcctctcttttcacccaccttcctcagtttgctcacttaccccaggcccagcccttcggacctctagacaggcagcctcctcagctgtggagtccagcagtcactctgtgttctcctggcgctcctcccctaagttattgctgttcgcccgctgtgtgtgctcatcctcaccctcattgactcaggcctggggccaggggtggtggagggtgggaagagtcatgttttttttctcctctttgattttgtttttctgtctcccttccaacctgtccccttccccccaccaaaaaaagaaaaagacaaacacaaataaaatatctgagcggaactgtgcctttggcccaggctgcctctgtctgctttgtcctgccgcctagcctccccggtatgcccccaggctgaccctcggcccggctccatgacctcttcaccccatctccgttatctcagccccctcactcctccagcctcatgctctctgccttcatagcttcattgcaccatgaccaccaccggctctggggtctgggcccctgtagaacttcaccgaacttcttggtcccacagagcgcctgtttgcgggttccttccagaggtcttagtttccaggcccttggtctcctcatcccttgccttttctcccaaccatggctgcaggggaccaaattgctctcctgcatcaggcattaccctagtgggttgggggacggggctgcagaccctccacagtagggggtgctgagctgggggcaaccaggcggagtatgaaggctgtggcagcaggattgagtgtgggcctggagtgggagctgagtgtgtgaggggccgggctggaatgcggatctggtcagggtggtagctgctggccggttgaacttgtcaggccctttctggccacctcctttgcccctttctcctctgcggcccaaaatggggcagccccttcttacccatttctcagctcggtgcttctcctccttccctgccttcctccctgagctgctggacctgggacttcctgtgtctgtccttagtcgtgttgctttcttcatgggtgttttgtgtgactggttcttctcgcttgttctcgtgcacgttctcatatttgctcacgtgcttctgtctctaggtcacagtctctccctctttgcctggtcagagcttccaagatcctcagttccctgtccagtaactccgatgttctttctcgtgggtatcgcacccaactccgtgcacgtgctcttggaacctcttgtcttctctgcatctcttgcccatcgagaccttcctgatctctctcaacacgatcccacctctccatgtctgtctgtctgtatacagctccccccaccccctctgtctaacatgttttctgtttctctccctctccctgtctctgcttctgtctcctctcctcttctctctcttctccccatttcccctggttgttcctcctcttcctcttcctcctcttcctcctcctcttccccgctgcccccatctccccttgatccgtccactgcatagtctaaggagctgcagatcaagaagcagttccaggagacgtgtaagatccagactcggcagtacaaggctctgcgagcacacttgctggagaccacgcccaaagctcagcacaagagcctccttaagcggctcaaggaagagcagacccgcaagctggcgatcttggcggagcagtatgaccagtccatctcagagatgctcagctcacaggcggtgaggcctggggtccagggagggagtgcgctagaggccaggctctgtactttgctttagagaaatggacggtgcagggcatgcacagagctggggcttttttacttgggaaactcacatactctccctctgttcgtgttctccacaatgatttatttcatattctcctcagtggttttattctttctcttagtattttcttaaggtcttgacaaagccatgtgcctattcccaagaaccaccaaggaaaagagtggctattatttttttcctgggcctgagttagtttaatgggtaaacagggtgcagattaaagtgagtgtggccctcaagcccatttactcagacttctggaggattttgaaagttgctgttctaaaaaaatgatcacacctaacactggaatgggccacttaaaatgtgcggagagggtggagagtggaaacgccccacccaaggctgttctctcacccagtcccacctctcccaggtaacttgttaataattaactgtattttgtgttttttcagtgcacattttgaaaaattatatgaattttaaacacagatggaatcatactttacatttactttctgtaacttcttttttccacttaatatttcttggacatcttcccctgtcagtacacctgtctcattttttttacagcatagaattttccatggtatggctgtaccataatttatttaacccatcccttattggtggacatttaggttgtttccagtattttgctatcacaacgcttccgtgaacacctcgagcacatgtgcaagtatacctgggggatagattctgcagtgtaattgctgtgccacagggtatgaccatcttccattctgatagatgttgagaccgctgcttcttgaaaccttagggcccaggcctacctggggcaggggaggatagtgggggtgggggaggagatccctacaactggttgttcatcttccccagctgcggcttgatgagacccaggaggcagagttccaggcccttcggcagcagcttcaacaggagctggagctgctcaacgcttaccagagcaagatcaagatccgcacagagagccagcacgagagggagctgcgggagctggagcagagggtcgcgctgcggcgggcactgctggagcagcgggtaaggggcccagcctccaggactggggagggagggtgggctcctgcccccgactctaacctctgttccggatgccccaggtggaagaggagctgctggccctgcagacaggacgctccgagcgaatccgcagtctgcttgagcggcaggcccgtgagatcgaggccttcgatgcggaaagcatgaggctgggcttctccagcatggctctggggggcatcccggctgaagctgctgcccagggctatcctgctccaccccctgccccagcctggccctcccgtcccgttccccgttctggggcacactggagccatggccctcctccaccaggcatgccccctccagcctggcgtcagccgtctctgctggctcccccaggccccccaaactggctggggccccccacacaaagtgggacaccccgtggcggagccctgctgctgctaagaaacagcccccagcccctgcggcgggcagcctcggggggcagtggcagtgagaatgtgggcccccctgctgccgcggtgcccgggcccctgagccgcagcaccagtgtcgcttcccacatcctcaatggttcttcccacttctattcctgaggtgcagcggggaggagcagatgagctgggcagggcaggggtgggtggagcctgaccctggagggcactgagctggaggcccctgcaagggtaggggacaagatgtaggctccagctcccctcagacctcctcatctcatgagcttcttggggctggccagtggcccagggccagcttggcgataggtgcctcaaggctgcctgggagccccgcctccctaccatggtgccaggggtctccctccgccacctaggaaaggagggagatgtgcgtgtcaaatattcatctagtcccctgggggaggggaagggtgggtctagacatactatattcagagaactatactaccctcacagtgaggccctcagacctgccacagggcagagcaggtctggggcctgaggcagggagaatgagaggccaccttactggcaggaaggatcaggatggggtcttggggtcaggatgcctgggtctcttcccgtaactgtctgacgtcctgtgccgtcttgtcctttatctttttttttttttttttaattgggatcagggctggggcggggaaacaagggaaggaccttggaaggggctgctcccaggcctggggggcagtcgtgggagcccctctcagctgtggggctggcacagagccccaggcaagcttttaataaactgttggttattctaacagatctcaggactcacccttctgtctttggtgtgcgtgaaggactgctcagtggccactgaatagtactgcttgtgttttataaagagaatttattgggctgtgtatctaaacatttcagtgattttaatgactttaggtgtgaccagatctcggatctcaaaggtggtcttcaaccccttgacctctaattcgttttctttgctttgacttcaaagattcttaggtttgcctcccacacagaccccaggcagctccatgctcacgaatcttcccgcaagcctcagcagccagagttcagtggagacctcatgtgactgcagaggctgggcctgtagccagaggcctagagggctaggactggcccaggaggtatgggcttttccccacccctttgaggctaacagcccatggacaaagtggctgtttgcataagggagaaggcttaagcactggctgccctcaagtcattctatccctctcccaagtgggcattaggttatcagactaggctaaaagcagaggggccacggggtaggcgggcagcacaggagccacacacccttctccaaaagggtctggtggctgttggatgacagggtctggaggcagggacttcttccaggaacccgggggaaattaaagggaaccaggccaggggaggaggtggaggcagtgactactgctcagtttcctggcccaaaatacaggaggtgagaatgggggaccaaatttgatgaggtgattaaaaacactcctttattgagtcttaaaaaataaacaccttaaagggacagcgtgaagctgagaagtagcatcccaacagcttgtgtccttgggagctgcagtcttctctgaaggaagctgcttctgttccacagacacagggcaaggggtgctatgtatgctttgtacatgtatcaagggtccctcctgggggtggcagagctcagttactctcgccatcactgctgatgatgccacgcatatgtgaccagtctgggggtgcgggacggggccgctcttcatctgagtccagggtccgtcggtacagctcccctgggggtgctgcttctcctaaagggttccaggctgtacgtctgcgtggccggcctaggggaaaggggaaacgagagatcagatgtctgagaaggtccaaccccacctatctgctcctgggcagtgagaggaaaccccttacccgagccactgatgatgttcgcaacatccaaggaggccacctcagctgcctcctccctctgctccttcagggcccgacacttccctagggaaggggtacctggggcagaagaagctggtgattctctcctccccagcaggaaggccctctcctgcagcccccagggcacgccgggcctcacccttcatgcctagcgcttccagttctgcccggaggatactcaggcgctccttgtgtgagcaacaggagcccaacagcttcttgtagtttcgatgggcaccacaggcccgaatgtagcgcttcagcctcatcacagccgggtggtcctctccacggcgacctgagccagcctagcaaggaaagagcagctgaaggccaagcctgctgggcctgaggcagggtctccctcttccctaatagtggcctcccacccctcctcaccctcaccttccctcctttggcctctggacttccatctgaggaggaagaggagcttcgtgtcctgcctttcctggagctcttcttggaagagcggttcttcctctccccctgggggcctccccctgcctcgctgtcacttacctccctctccaagtcactttcctcaccactggtgctgcccagtctggccatctttctagagcctttagctgtgggttcccccttcccactgtcttcctcgtcctcgctgcttccactcaacctcttcccacccttaagctgggtcctgtcctcactcttcctctgcactgggggttctctatctctcccactgtcatccccactgctggctgcctctttctgctcttcctcgctgtctgagtctcccaagagcctctttgcctggcttttctgcttacagctcctctcctccctagctgactttctccggccattgctcctggttctgggtttccaatcccccttttcctcatcctcttctttctcttcctcctccacttcctcctctctctgctctttcttctgggctaggatctcctcttcactctcctgttcactttccttcaggcttttagttcctttatttccctccaccttctttgctgtcctctgaacgggttctgcctcgctctcctcactttcttccctggcctgcttcctactgactgaggccttgcctggtgcctgcttctttaccacaggtttcttcctagtcttccccttgtaccccttttcctcctcctcactgctctcctctcccctctgtgcgggcaggtccctctgccgttcctcatcactgctctcctcaactgcctttgaggctcgccttggattctcctctttggctgggctgacttctgctgccaccccattctttgctgggggtccaaagtagtctgggctggaggcttcagagccggactctggaatatggagaggagagagggttgagacaggctcctcctgtcccttctcccttcacttcggataggttgcctcgagccctgccctgacagttggaggggcagcaggaaacagctatctgtacttgctgttcccggttcctgactcactagccttgctccctcatctaacgcctggggacataagagatgcgcagtgaatgcttcttgagtgaaccaacgatgcagaaggcccccacagcagggaggaagcactaacccgactctgaattgaagcggaacctttttctctccgggtcgctacaaggggtgggaggcctcttgcccttcttggtaaggtccagtttgtcttccctggaagcggcttcatccacctgtgtgtgcgccaagagggcaaactatgcaccaaggctgcgctcaccgcgccccgtcaggcccctcctcctcagcagcaagccccgcctccgcctcccgcggcccaggctccggcccggcacacctgcatcttcagcagctcctcctccaccagccgcttcagtgcctgcttctcctcgggctccaggtggctgcggcccgagtgagctaagtacctccgccgcacgatggaatgcgtaagcgtgctgcagggacatggtgtcaggacggagtcccgacccacccgcgccctttccaaccccatctccaaccccctgggcacctgaggtccgggcggcctcggaagaagctacgggtgaactcctgcatctccttctcccgcgccattttgctcaacccgggattgacggctcccgcctttttttcttctcggcctccgtcagcgcgtttgacagcggctcgcgcacgcgcagtgctgcggcaacgtggggcgagggaccgttggcccttggccgcggaccgcgtgggccgagaactttgccagacgagacttgttttctctgggcagttggagggtctcgcggctcctacccttttttggaacggatcattttaaaagttctcgttagaaaccaattcggcgccggcaccctttgggtgaaacctaatcagcccgcgacgctgcctttctcactggtcacgggcaacagctaggctgctgttatttcgcaaggcagaagagaaaaggcatcctcgcgagcagatgaggaacctcggggataaatccttttgtggcttcaagtgtctaagtacattagagtcaggaacggcgctttccagcgtccgccatttttgtggcgtcaccgcgtcgctgctacgccatccccagcgcagtggctgccgcgctcctgtcccagtgtcccccgggaggtcggcccgtgcggtgacgcccctgagcgcggggtacgccgggagttgtagtcctgacggcacagccttgcagcgtctccggaagtggaggcgggagcggcacggcagccactgcttggggtagcgggagggcagactctgggcgccactcccgggccggtcatgaacgggccggcggacggcgaagtggactacaaaaaaaaataccggaatctgaagcggaagctcaagttcctcatctacgtgagtgctgccgcgggaaggctgtgggggatgaggcctggcgcggacaagatctcagtttacccaggtgtaaagtgggtggggcgagcggccgctggttccggggcccttcacggaggaccgttggcccagcgcaccccttgcccgtgatacaggagcacgagtgcttccaggaggagctgaggaaagcgcaaaggaaattactgaaggtgtcccgggacaagaggtgaggcacgttgcaggggcggagggcgatgtgcttcctaggaaatctacattcggaccccatccccgagtagggccacaagtgcatgggctctttcaagtatccgatgggccagctgggagggacaggtacccaggaggacattgctgcgctggaaaatcactgtccgtgtctccttccctcccctcagtttcctcctagaccgacttctgcagtacgagaacgtggatgaagactcttcgggtgagcaaggtcttcaaaaattggtggagagcatggttcctggtacttagcaagcttcctgggcccccgccttttaggcagtggtggctgatgcagcccccagtggtccttaagcctagttgcttgccttccacctccaccgttctttcattcaggcacttactgagcacctattgtgtttcaggcactgtgcttggcacaggggatacagcagaggcagagataggcaaagcccttggcctcttgtaatttatattctagttgggaagaataagtaaatgaagacaatagactagaattttaggtcataggaaggacttgaaggtaatgaaaacagttatgcggtaatgattatagtagaacaggggttgatgaattgtttctgcaaagggccagatggtaagtaagctttttgcaacatacaatctttgaagcacctactgaactctgccattgtagtagcagccgtaccccataggcaaatacatgagtatggctatgtttctataaaactttataggcactgaaatttgaatttcatatttttccatatgaaaaatttttctttagttttttttttttccaaccgtttaaaagcttaaaagccattcttggccaggtgcagtggcccacgcctgtaatcccaacactttgggaggccgaggtgggcggatcacaaggtcgggagttcaagaccagcctgaccaacatggtgaaacctcgtctctactaaagatacaaaaattagtcgggtgtggtggcgtgcacctgtaatcccagctactggggaggctgaggcaggagaatcatttgaaccctggaggcagaggttgcagtgagccgagatcgctgccactgcattccagcctgggtgacagggcgagactccgtctcaaaaaaaaaaaaaaacgcccttcttagcttgcagaccacacaagcaggcagcaggcaacctctgaatggagtactcaagaaaggcctttcacagagtgacatttgagttgggaccagagaagaaaccagccttccatcctgggcaacatagtgagaccccatctcaattaaaaaaaaattagccatgtatagtggtgtatacatgtggtcccagctacttgggaggcagaaccaggaggatcccttgcctgaaaggtcaaggctgcagtgagccatgatagcaccgctgtgctccagcctgggtgacagagcaagactgtctcaaaagaaagaaaccccatcctggctaacacagtgaaaccctgtctctactaaaaatacaaaaagttagccggggatgttggtgggcacctgtagtcccagttactcgggaggctgaggcagaagaatggcgtgaacctgggaggtggagcttgcagtgagctgagattgcactactgcagtccagcctgggcaacagagccagactccatctcaaaaaaaaaaaaaaaacaaaaaccaatcttgtgaagaagtgggctagagctgtcccggcagaataatataaatgcagctaccctgaggtaagaacaggtcaggcttggttgaagagcagaggcatgaaagagagagaacactgttttcgtccttttatttgaatattgtctgcagttaactatattttacatcataaccagggccccacatgttaaacaaaacaaagtttaacgaaacatttttaagatcactgtatccaattcatcctgacactttttagactgcttttttccccttcttttaatgctggttgcaaaccaataaattgatttcatgacccactaatggcttgagacccacagtttgaaaaagccctaaggtaggcatttgtgggcctcttcctgggtgaggccctcgtaagccatgtcacgtagaatcacctctctccgtggtgcctttaaacattggtctgggccgggcacggtggctcacgcttgtaatcccagcactttgggaggccgaggcaggcagatcacgaggtcaggagatcgagaccgtcctggctaacatggtgaaaccccgtctctactaaaaatacataaaattagctgggtgtggtggcgggcgcctgtagtcccagctactcaggaggctgaggcagaagaatggtgtgaacccgggaggcggagcttgcagtgagccgagattacgccactgcactccagcctgggcaacagagcaagactccgtctcaaaaaaaaaaaaaagcacattggtctgaggcagggattggcatgtggcagccagccacgttttaggacgtagtgttttgtcagaacgcatgatacccatttgcttgttattataggaggattgtagataaggttggggaaataggcaggggcccactcaggtaggtcatagtaggagatttggcttttattgtagcctctcatcccctgcctcttccttccctaggggcttccagttaacatcctgtttgaggggaattcagggcaggaggtgggagagaacccagcatgttcatggccagagtgggttgcatctgaggaggaagagccagcgatgcgagccccactcccgtcctggaggcccacgccctggccagggagacactcgcaaacgacgcttttcagcacagtgtgagggcagccatgacgagagtagagcgttccaggagagcctgcagttaactgggcttgagggattctggaagacttcacagaggaggtggcatttaatctgcttcttaaagggtctgtctgagcagagacattggtaacggcttctataggtgtagcagtcgtttgttcgatgaaagatggcccttctaggcagaggcactgaactaggaaatacatttcttttttgacgaaataggtcagtgtgctttaaagaatacagttacgttagttgaccagaaaggtacattgaagccagattaagcagcaccatgaattcatgcaggtagtgggtgatgtcatcaggaaggatgtgaccaggtttgttttaggtcactctggggttgggggtggacagtgggtggcacggtgaggtgagactgcttagcaggtgattttgacgtgctggtggcctgacctgtgttagttggtgtggggagcagtggatgaaggggaggacttcaggggtagatgaacaggaccctggttatggggagtggggcagaggcaggagttgaagactgctcagctcagaggcaaggaaccagtggcatcaaacagccaaggagtcacagacctggcttggagtcttagcctcacaccttactttctgagcctcggtgacctcatgtgacaagtggaggtgctgcccttcccatccttccttggatctgatgacaaggagaggtggtgagtgggaaagagcctggcaccctggccatgcgtggcaggtgtgttacggaggaaccagagcgggcggggggctggggaggctggagaggctatgggcctccctgggacagctcgagtgtgtggtgcatgcgtgtgcccaccagctggtgagtcagattcccccggggcccttctgttaggttttggtttgtttcatttttttgaggcagggtcttgctctgtcacccaggctggcgtgcagtgttaaaatcacagctcactgcagtctcaatctccgagtagttctcctgcctcagcctcctgagtagctgggactacaagcacacgccaccatgctcggataattgtttttgtttttaatagagatgaggtcttgctaggttgtccaggctgctcttgaactcctggcctcaagcgatctggccacctcagcctctcacagtgctgggattccaggcgtgagcccccgcacctggtcttccagtgcccttctgtagtgtagaggaggttatacctttctgggatggactgggatccccccatccccactgaccagctgtccccatcacagactcagatgccactgcatcatcagataacagcgagacggaggggacacccaagttgtctgacacaccggcccctaagaggtgagaagaagatgcattcctctcgctggggagggtcaggtggggcgcctgggctcctagccacatctgacctcgccctgtcctttctccaggaagagaagccctccgctggggggcgccccctctccctccagcctctccctgcctccttcaacagggtttccccttcaggcctccggggtcccctccccatacctgagctcggtgagttggggtcagggatgggaagtgcttgggagtaaggtgggcgtcatttgggcagaagggctgggcctcggggcaaggccagcccaactttggggacatctgtctgggtgtggcccaagtgtcccgtggagggtgtgagtcggggctgcccccttctctctggtataggaacggggccaggcctgactgaggagagcaaagcccaggacagcatcctgctgctgcccggcccttctgtgctcgggagccccgggagccgcactcatcaccatctcttttgtttttccatcctccttctgtttgcatttcttcccccaccctcaccccggtccattccgcctcccatctccatccccgctcccgcccgcagctggcctcctcccgctaccccccattcccttctgactacctggccctgcagctgcccgagcccagtcccctgaggcccaagcgggagaaacggccccgcctgccccggaaactcaaggtaccctgacgtgggggtgctagggaggggcaggacggcaggaggacagtcacctgagggaggctgaaggcgggggcctgtcagagaaccatgaacagttaatttggggacccagtcagcacttagcactgaggggtggatcacagaagtctcggcttacaggcttgtatggagacaaatcagggcagaaccagccttggaggacccggtgtgcagatgccagggatcccgccctttcatggctgcagtgtagcggggccaggctcattttcccaggggggcgtgttgtgtgatgccaggtagccccagaccgggtcaggattatgggatctagagtcaagtcaagactgcctgttagaaaccacgtggccttgagcaggtctctgctaccctctaggcctcctaggcttggcacctatagggcgagtggtcctactcgatgtgaccagcaagcgcccctggagcgcctcctgttacacggcagtgcacaaagcagaccagtgcctgccctcacagagctcacagtctagcaagataggcagaaaacacaccagaaaagtaggtacttgtggagaagaacagagcgaggtccagagcatggggacgccagggggacgaggctgacacttagggcccagcagtctgggatgttcttgatcagagacttacaggaaatggcagcaagctgtgtggctcctgggcagtgtttctgtcgggcagagtctgtgtttgggagaaaagtaagcagggaattgggtcccggagcaggtcagagggggagctcatgaggtgccagtgtgcaggattcgctgtgaatgaagccttggagacagcagttccctggcggggcgcaggttgcaggtgtggagggggagtgatctaattgcatcttaacaaaattgcagacactggtggtcagagaacagactgagcggtggagtgagttgggacgggagtgaggaggccaccacggtaaaccaggccaagggcagagggtccagagggagctgcggacccatttcagagaatgagcatgggagttcctggaggacctggtgtgggctgtgcgggagagaggccaggatgcctccagggctttagtctgagcacgagtggagtctccctccctggagatgggagggctgtgggaccacaggcttggaggaaaactgagtctggccgcggatgtgtcagatgccatctggaaaggcagctagatagcggcccgtgaggggctgcgcatttggaagccgccaggctggcggtagatgcaagccttgggagagatggggatgggctgaggggcagagcggagtggggaccaactgggcggctcccagggttctggagccagaagcagaatgagaggccgcatttgcggtggtctggagtacaggatctggagctctaatcccaactctgccgttttctccgtgtgaccttggccctgtgaggcttcacctcttgagcctgagaagcagaggtgacagtactggccctggttcttagcaggggggtggcgggcagggtagggggtggcgcagcactggggggcactttgaggctttctggctgggtgctgagtcctgaagcagagtcatgtccgggagcaaagttgtagacattctggagagaaggtttgagagggtggcccaggtccatggctgtcgggggaggtggggagaagccaggaaaggcctcagcaaggagaacgtgtaagcccagggtgagtggatttggatattcctggctgaagccatagtgggaagggagacagggccacagggaaagcactgcctgggccagagcaggagtggtaagaaattggcaagaagaaccgggtggggtggggtcatggaaggcctggacagtggcctgaagtgggaatttgtctgttactgtcaggggagcgggagtccctgaagggccaggggagtgaggagatggaaggaagggagtccaagcagaggaaggatagctgtgaagacagaagcaggttggttctgtcaggcctgagttggacttggccagctttgaatcccagctcttccagtgctcaccatgcgacctcagcgttgtcatttcactctttaagccacagctctctttctccattcagtggcggcattgtgcggagaatgtgagtgaagggatgaaaatcgctcggcccgtgcctggcccctagtaagccacagagaaatgtgagccgctgccagtcaggctgagaggacgccactgaggaagtccaggccagggtgggacatgctgcgcacagtggggaaggagaggaggtggccagaggaggggatggtcctttccagtcatacacgcatgtctgcttgtgtgtgtacatgtgggggcctggtgcagggcgtgggggtgctgttcagagttggaccccccatcatccatcctgccagcctcctataccctgaggcctgacccaccctggcccccacaccaccccagcagcggagatgagggtaagtgagggctccttaggaagcagagaggaggccacagggccaaatgtgacactcagaagggccactggagaccacgcatggcgtttcctgccagcccactcagcatctagcccagggccagactggacactgccccgcaggacccagcaggcctaagcctcaggacctccatgtccacaccaggttcagcctcctctgctggcacgtgacttctccccgtttcccgccccccagtgtcctgaggctgggagggcattaacagaaaccacctgacacacagcaggtgcccagtttgtgcccacagacaaagcacggggactgcagaggagacccacagagctctctagggagggtttgtgaggacctggcagcgggggggagctgaagggttgagcagggcagaggccacttcccaccctcagaggacaaagcaggacttctgacaaatagagcaggatgcccagggggaggggctgcctgtcgtcccgcaggcggcactcccgccccgaggccccgagtggcacggtgacgcgctcaggtctgtgttttagagcgcgcgctctggctgccgtgcggaggagctggatctgggagaggctgcgggcagggagtccagttaggaggctgggaccgcagcccaggtgagctaagaggagggctgggcctaggccacagctgccgggaccccgaggaggggcccatccaagacataatacaagcttcttgggggcagataagccgctggggctcctggctcaggcagcctgcaataccctccaccgaaccagtgagtgccgcagaagagggagaggaggagtagggagaggaagctggtggcaggtggcacctccggggccggcaggcaggcaagcactccaggccgactccgcctctggcttaacccctgtctcagggcagcccaggcgcctccctggagagggcaggtgcccgggcctttccctcccggtttcctgtgagacacccccatcccctcatctcacctctatcaccacccccaggcacttgctggtttgaggctctcgaggggctgaggggggcaggccctgagtgcagcatgggttggcccagctgtgcccagggcctcttccccctccccagagctgccctggggggcaaagcctagtctcctgaggccccagtgcctccctgactagtccccctgtgtttcttccccctgctgcagatggcggtgggaccccccgactgccctgtgggagggccgctgaccttccctggccggggttctggggctggggtcgggacaaccctgacccccctcccaccccctaagatgcccccccccacgatcctgagcacggtccctcggcagatgttcagcgatgcaggtagcggggacgatgccttggatggagacgatgacctggtgatcgacatcccggagtgaccgtgacatcacgccatgcccaccacggccccgcccggcgccctccccgtgccagcacacacgagtccagcttcctcggaggtgtttattgatgcccagctgccatgctccggccactgacacaaccagaaaaggcgtaaacatgcacgggtgtcccccaggagggtggcaggggccctgccttcaaaccccggccccctccaggggacagttatttaaacgagtggccgggagcatctgccacctgctggggaggcagagaccctgcaatggccacctctttaaaagggcagctgtacagggctaggttttttcaatgaagtttctgtattaaaggagtggctctgggtttgttttttgtcctttttttttgagacattctcctcctctgaacctcccctaatccgacctcctccctgttgggggagagggacggggcagcgtggagaggcaggagtgaggagcgcgggggcctggggccgggctctgagcactgcccgggtgtgcagatgatggggggtttgcatatttgcagggactagcgagtcaggcaggaggtttgcatatgtgaatatagaactccgcagcccctcatgagcagacagacccgggtcacggagactcacaaaaataggtagtgcagggtgggggcagcccaccctgtgtaaacgtgcaacacactcgtgcgaaggttgggtactggacccggctcgatgggcctgtgccgggacactgctgtccactcaggctgaggacagagccccggccgcagggggcagctcactggtcagggtgtgccagcgctccagggctgcgtccggctgctgcaggcagtcactccagtgcttccgagcctcgcctcgggcacctggccccagggacacgccacctggggagcaggtgggcagggtcagggccacctccctgccacttgcccgccctcaacacccgcagccagctcctccctcaccaatgaagtcattggatttgccaatgtcatagtcccagacggtgacttccagggtcttggtggccagagtggagagctctatctcgtagaaaaactcctagggacaaggccggccacccgttcgtgagccagctccccagcccctccctggcctccctccatgtcccgtcccctcctgggtacctcgttaaattctgggttgagagtcttcttcttcacacacgtcttatgcttggatttcttgtccacatcgggcctcaggtacctgggggtggggtggagggagacgaactgaggggtgagggacaggccaggcccaactcaggccagggcaggctccctggggaggagagggtcagagcaagggctcacgtcttgacgtaggggtccgagtaaccgttgacgtccatggcagccagatgggcgcagcgcaagatgcctaccagcagtccccggcgccgcgagctgtagctgagactcagcaggatgcggccacgctcctccagcagcccctgcccctgctccgcctgctccaactgcggggcacagactcagggtcagcctgggcccctgcagcctcccacccacatgcatccccatccccatgaggtgcctcacctccttcagataacaggagatgcccctcagcgccgctgacatggaagagggggacgccagctgagggggcaaagagaaggttctggaagcctggcctccccagggccccctcccctggcgcccctgcagcccccacacagaccgggacctggcgctcgaggcagatgttaaaatgcttcttctgcgaaggcttgaggcggcggaggggcacgcggatctccccaataaactcattgtgactcagcttgtcctcatcacagacggcgatcctggtcgggaactgcagtgtcagggcccctggggtacctgagccccgttccggggtgtaggaagggccttggaccagcccagctctgccctaaacactacgtctcatctggaagacaggctggcacttgagaaggacaagcagatttgcccattcctctgtccctccctctgcagccacccggctgtccctggtccatcaggacatgctcagccattgtgggaagccctcagaaatcttggagcacgctgctcactgcctccattcagggcctgggggcaggagccgaacaccacggtggatgtggccatagacacaggccgtgagagctagaagggccttggagccttgggcagccagaccagtaccccacgcctcctcgggaacccccgtccttttcctgcatgcagcagagagccagccccgcagggactcactaagaaatgattgctttccagccacctgtcctcctgcagtccctgccctgcctccgcagtgacccactaccaggctgggcatctgtggcatggaggatgggcagatcccagccctgccacttctgagccacctgtgtgaccttgggcaagtcacttgatcaccctatgcctcaattcccatctgtaaatggagatagtcaagggaaagaaagaaatgtgaaaatgctaagcctgggctgggccctggtgagcgctcattttttggtctcattctggttttggcctctggcctcccctccattccacccgaatagctgaaaccaaggtggcctctctgctgcacagccctgaccatcagggaaggtcccagctgcaaatccaagcacaaaggcagaggtctctccagagcctgggtttcgctgcccgccacctgacttgagggagtactctccctacatctccatctcctaggatgacggagcaagttccctgtccctgaagacttcactccttaagagattttaggggaactcaaggcacggaaggggcagaccaaagctgcagaggtctggcttaagccaagggctctgagaaggggtctcggcaacccaggaacgtttttgggagggggcagagcttggactgaacctcagatgagcggaatttaggctggcaggaaggagctttccagatagaaaacaacaggaaaagttcaggagttgtggaactggccagttggaagaagggagtcctctgtttgaggggcagaagatacttttgttttgtttttgagatggagtctccatcacccaggctggagtgcagtggtgcgatctcggctcactgcaacctctgcctcccgggttcaagtgatcctcctgcctcagcctctcgagtagctgggatttacaggtacatgccaccacgcccggctaatttttgtatttttagtagagacgggggtttcaccaagttggccaggctggtcttgaactcctgacctcaagtgatccgcccacctcggcctcccaaagtgctgggattacaggtgtgagccaccacacctggcaggcaggagatattgaggggcaggaatggcagggaagaattttggcctgctgccaaaggggctagggagccgctgatggttcttgagcatcagagaggtacgggcttaatgggacatagatcaaccaaccagcggttacaatgtcagctgtccccgagctgctgctgggtggtggggaggggggccctcacctgagcaccttgtgcgtgatgtcgtcatctgtgatcccgctgtaagtcaggtcctcattccacacgggattcagtgtgttcctctgagtcttcgtttttagcttattggcctgggatgtggggatgaaaggttctcaatacctgtcctccagccccacaggctggagtcatgggctgggccgggcggggcgagaggaggctgttaccttacaggctccaggcagcaagtgcagcttgacgtaggggtcggcgaggccattgaaatccatgggcttgaggccctggagaggagggcaggggagagggctagaggctcccggcacctctctccatccctcttgtagagctggaccctggaggagcccagaaggagggggcaagggcaggacgaaggagcaggcctgggaagggaaggaggaatgggccccctctgggggctgcacgcaaaccgggcccgggcttgggtggcagggagtgcccaccttggccctgaggatgctacagtgcagagtgcaggaggcccggtcgtagagaaggtcaaactccagcgtgcctagggcggctggagagagaggaaaggcagcatgggtcggtatggagacaggtgtgtgcgagaggccagcaggtgggcactggctctgtgtgtctctctctcttgccagcccgcgagtgtgagtgcaagaggctgagtgggcccatgcgtgtgtgcgtctgggtccctggctcggccgcaactggggctgtgtgggtggtggagtgtctcagcagaaatactgaatattgagccttgctgaagctgtaatctccacgctgactgcagctgtggtggccgtccctgccacccccccactgccctcctcccctacctacatgcacagccagcagggcccatccccctctccccccaccacggcaagcctggagacccccaccagcacatggggcctccaagcccccagactcactggcatcatccgagtcatagctgtccacctccgcaccatcctcaggcgtggtggccccaaggagggctgcagggggggccagagccagggggaccagatgggcgggggcctccccgccgcccccgccgcccccttcaggtcctggtccccgggggaagtagtcagagatctggcggatgggccggatgggcccggggcacacgttgatggccatgtgctcctggatgttgatggtcatgcgatcgcccctgcggcccctcatgcagcacccctggctaggagagggcgtgtgagccagtgagcccatcatacctagccatcctggctgagggccaggcgacggcctcctcggtctgtggggccctcactggcctcccttcctaggtgtcgagggagagggtggtgtgtgccagccggtggcaggtgggaggcctgggccctgcagaccccaagctgactccacaggggctgggctgccaacccactccttgcagaagtcgaggttgcaccaccccgtcctcacccacccacttctaggttgtccctgtatcatcttgccagctccttcctctcctccggggctcccctctgctcctgagcctgcctgtcccccaaggggccctgcagggccccgcctctgtttctcggaggctctgtcctcctctgcaccaggcgctggtctagtcagggtgtcacccacccctctaggctccaactgcccactgtcccctcattcagccccaggacctgtctgcctgcctggttcccccgctcgctcaccacagcccacggtggagaccccagcctcagatgccacctctggctcctcaggggagccagaaattgcagccgcaggagagccgaacacccccgtagcgcacacaggctggcacgcttccccgcaccctcacgcccccggcctgcccagccccctgcacctgcctctgcctccaacaggtgcccaggcactggggggacggcgggcgcaggctgggcggcggcggccggcgaggagagcgcggagtcgagctgtgcgagccgagagggagggagcgccgagaaagtgcggggaggagggggtgagcgaggtggaggcgaggatgcagccggcgcggcggcgggggacggggaggggcgctggggctggggagggggcgggatctcggactcccacccggggcccgctcgggagcgcacgcgagcgcgcacacacacgtgtgctcgcgcgcgcacactcacgcaggggcacgcggaccggcacacactcgtgtgcacacatccaaccgggcacccccgcgcgcacacgcccgtgcccacgtgtgcacgctcacacccttgcacacacccaggcgcgcgctggcacacttacccggagaacttcgcacacacacgcactcgcaaacacgcgggctccctgcgccaccaggaagcagccgccagaatcgccgggtgttccccaactactcctgggagacctggccccccgcccccgcccgcgcgcgcggccacggcgcctccctccctcccgggtccccaaggccggaccaccggcctcgttgtcatggcgacgccggctcatctccccccacccccgcgcgtcttcacgcccctcccccgcagggagctggggcctccctcctcccttccccacgtccgtagggacccacaggttgacaggagcagggggtcgcctgctgtcaccggccggggatctcggggtctcccgagccaggctggggagcctcacgatctgagggaggaggcagaggtctgatgctgcggcttcccccacgccccctccctttggccgttcaggcctctctccttgtggcccaacccaactcccaggggcccatgtccccttaccagggatggtatctcctttgggaaccaccctcccccctgccatccccagttctgccccgcaggtgggaaggggcgtcggggcttggctctgaaggtctcagagccctgcggtagttccccatgggctgccatttctcacccaaaccttgccacccccaagccgcccccctgcccggccctgcgcctgccacggagtgtcagtccacccctggccttcggtcttcactcacctgtgccccaaacttaccatcccgaagacacgaaggggcttatcaccctcgctgcccaccactgactcacccaaccgtttcctgcagttcctgggacacacctagacggctcaggcctagggatcttggctcacatgcgctcctctacctgggaaccgcgcttccttaggaagtcaccgtgggtcccctcttcctaggagccttcctggggcatcccgcactgcccctcagctccagcgccgtcaggactcggctcagcaccgcttcgccagtgcctcccccaccagcagggagttccactggagcggctgattcatctgggagtccctaatgtcccaaactgggcctggcacgaagtcggcatctctaagtgctgttatttaaaacagcaatctggttgcacgacaactgaacatacctaacaccacctaatcttacccttaaaaatggtgaagatggtacatttcgatatgcgtatttcacggcaatttttttttttttaaataagagaaatggggccgagagtggtggcgggtgcctgtaatcctagctactccagggactgcggcgagaggatcgcttgagtgaagccagcctgggcaacacagtgagacacagtctcttaaaaaaaaaaaaaaaaaaaagtaagagaaatgtaaagtcaacaacactgagggggcggggcgcagtggctcacgcctgtaatcccagcgctttgggaggccgaggtgggtggatcacctgaggtcaggagtttgagactagcctggccaacatggtgaaaccccatctctgctaaaaatgccgggcgtggtggtatgtgtcttgggaggctgaggcaggaggatcgcttgaacccgggaggcggaggttgcagtgagctgagatcgtgccactgcactccagcctgggctgtaagagcaaaactcagtctcaaaacaaacaaacaaacaaacaaacaaaaaaccctgagatatcacttattacccataaaatgggcaaagccaaagtgtctgggctggggggaagctgagacggactgatcccttgagctcagaagttcaagaccagcctgggcaacatggtgaggccctgtctctacaaaaaaaaaaaaaaaaaaaaaaaaaaaatccaggcatagtggtgtgtgcctgtggtcccagctactcaagaggctgaggtgggaggatctctcttctttttttttcttttcttttttttttttttgagatggagtctcgctctgtcgcccaggctggagtgcagtggcgtgatctcggctcactgcaagctccacctcccaggttcatgccattctcctgcctcagcctcccgggtagctgggactacaggtgcccgcctccacgcctgactaatttttttgtatttttaatagagatggggtttcaccttcttagccaagatggtctcgatctcctgacctcgtgatggtgggaggatctcttgagcccagaaggtcaaggctgcagtaagctataatcactccactgcactccagcctgggtaacagagtgagaccctgtctcaaaaaaaaaaaaaaaaaaaaaaaatccttagacccagaaattccacttttaggattttatcttacagatatgccaacccataagccaaataatagaagttcaaattctttttttctttttttttttttgagacagactttcactcttgttgcccaggctggagtgcaatggtgcgatcttggctcaccgcaacctctgcctcctgggttcaagcaattctcctgcctcagcctcccaagtagctgggattacaggggcgcacgccccacacttggctaagtttttgtatttttagtagagacggtgtttcaccatcttagccccgctggtcttgaactcctgacctcatgatccgcctgcttcggtctcccaaagtgctgggattacagctgtgagccaccgcgcctggccatgaagttcaaaattcttaaatgtagcacgttccaaaagactggaaacaactgagatacccagaagcaggggaccagttaaatcagtcatgatgtaattccatgcagtgaaatagggtgcagccacaagaggctgttttgctcttgtttagaatcatctttttttttttttttaaatatacaaggtctcactactttgcccaagctggtctcaaattcctggactcaagcaatcctcccgcttcggcctcccaaagtcctgggattacaggcgtgcgccactgtgcctggccctagaatcatttcacagtttcattttaacttagaaaagccaagtgcaggccaggcgccatggctcacgcctgtaatcccagcattttgggaggccaaggcgggtggatcacgaggtcaggagatcgagaccatcttgtctaacacggtgaaaccccatctctactaaaaatacaaaaaattagctgggcgtggaggcgggcaactgtagtcccagctgcttgggaggctgaggcaggagaatggcatgaacccaggaggtagagcttgcagtgagccgagattgcgccactgcactccagcctgggcgacagaacgagactccatctcaaagaaaaaaaaagcaaagtgcaggctgggcatggtggcttacacctgtaatccccgcaatttgggaggccgaggcgggaggatcacgaggtcaggagttcaagatcagcctagccaacatgctgaaacgctgtctctattaaaattacaaaaattagctgggcatgttggcgggcacctgtaatcttgggaggctgaggcaggagaattgcttgaacctgggaggcggaggttgcagtgagccgagatcatgccactgcactccagcctgggcaacagaacaagactccatctcagaagaaaaagaaaaaagaaaaaaaaatcaaaaaagaaaagcaagtgcagagaagcatgcttggaatactgccatttgagagggaaagagcttagccgtgtttgcttagttgttcatatgttgtttctggaggcctgcacaagaatggtaactgtgtctcttgacaagctgagagagtgaaaaaataaaaataataataaaaaaataataaatacacagaagaaaatataactatggtgacctctggggagacagggcaggaagaggaaagacttacttttcaacgtacatccttttgtattttttgaattttgtgccacatgcataggttacctgttccaaagaatacattaaaataataaattttggtatttctttgtttgtttgtttgtttgtttgtttttgagatggagtctcgctctgtcacccaggctagagtgcaattgctcgatcgcggctcaccgcaacctccgcctctcgggttcaagtgattctcccgcgtcacactcctgagtagctgggattacaggcacccgccatcatgctcggctaatttttttgtatttttgtagagatgggttttcaccatgttggccaggctgatcttgaactcctgacctcaggtgatccgcctgcctcggcctcccaaagtgctgagattacaggcatgagccactgtgcctggccaaattttggtcttgtctttttctttcttttcttctttccttccttccttccttcctttcttccttccttctttccttcctttttctttttttttttttttttgagacagggtctcactgtgttgcctaggctggagtgcagtggcaagatcatagctcacgacatcctcgaactcttgggctcaggcgatcctcccactttagcctcccatgtagctgggactataggtatgcaccaccatgcctggctaatctgtttttgtttgtttgtttgttttgtagagatgggtcttactatggtgcccaggctggtttcaaactcctggcctcaagccatcctcctaccttggcctcccaaagtgctgggattacaggtgtgagccaaagaccatgcccagcacaataatatatatatatatatatatatatatatatatatatttttttttttttttttttttttagacagagtctcgctctgttgcccaggctggaatgcagtggcacgatcttggctcactgcaacctccacctcccaggttcaagcctcagcctcccaagtagctgggattacaggtgcacaccaccatgcctggctaattgttgtatttttagtggagatagggtttcaccatgttggccaggctggtctcgaactcctgacctcaagtgatctgcctgccttggcctcccaaagtgctgggattacaggcatgagccactgcacccggccaatatttctaaagtaaaggcaaccgttaggtttccttcgtggctctccagaataagaaaggaagcaggacgaagggagacacagtgcagtgtgaaagccggtgagtttagcaagagggtgtccatgacctgggcgcagggggcctgcagtgaggggagggggacactctggtcaaggaacctgtcgagtcctctctcctgtgctctcttcccacggtgcttgctcaaccccagccctgcctgcctccagaagaacttgttgaagacaggtaaggatgaggctggagttcaagccaatttcagaggaaaatgatggacagtgctgagccctgctttgtccagagacgggaggcttttgcaccagtcacccagtcattcagtaaatattgactgaatatcgactatagattgtggggatacaaccaggcccaaggtcaatgagctgtgacttcacagcctcatagggaagacagacaaatacacagacaatccccatccagggaaactgacgtggggacaggggatggtcagaagccatgggaactcagggtcctatgaggtaggagggaacaaagattaacacctcacttcccagaaaaggagttgtctcaactgagacctgaaagatgaggaggagttacccaggtcaagcttgggggcaagtgtattctaggcagaggtgtgtgccaaagctgggaggcagtccagagtacggcatattcagaaaagaaatcattctaccagcctggtcaacatgacgaaaccctgtctaaaaaaaaaaattagccaggagtggtggtgtgcacttgtagtcccagctactcgggaggctgaggcaggatgatcgcttgagcccaggagtttgaggctgcagtgagccaagatcaagccactgtactccagcctgagtgacagagtgagaccctgtctcaaaaaaaaaaaaaaagagaaaaagaaagaaagaaatcattccaccaaaaagacacctgcacttgtgtgtttattgcagcactgttcacaataggaaagacacagaatcaatctaggtgcccaccaacagtggactggataaagaaaatgtgatatgtatatgccatggaatactatgcagccataaaaaagaatgaaattatatcccttgcagcaacatggatgcagctggaggccattatcctaactgaattaatgcggaaacagaaaatcaaataccacatgttctcgtaagtgggagctaaacattgggtacctatggacataaagatgagaataacagacactggggactccaaaaaaggggagggagggaaagagtcgaaaaactacctattgccgggtgcggtggctcatgcctgtaatcccagcactttgggaggccaaggtgggcggattgcttgaggccaggagtttgagaccagcctggccaacatggcgaaaccccatctctactaaaaatacaaaaataattaagtgggcttggtggcatgcgtctgtaatcccagctactcaggaggctgaggcacaagaatcacttgaacctgggaggtggaggttgcaatgagctgagatcgtgccactgcactccagcctgggcaacagagtgggactctgtctccggaaaaaaaaaaaaaaaagaaagaaaagaaaattgaggctgggcgctgtaatcccagcactttgggaggccaaggcaggaggatcccttgagccccggagttcaagaccagcctgggcaacatagtgaaatcctatttctaccaaaaaaaaaaaaaaaaaaaaaaaaaacttagctgggcatgatgacttgatgatgcagtcccagctacttgggaggctgaggagagaggattgcttgagcctgggaggtcgatgctgcagtgagctatgattgcaccactgcactccagcctgggcaacagagtgagatgctgtctcaaaaaaaaaaaaaaagaaagaaagaaaattgaaccaacagatctttttattcttatcttttacagatgggattctctgtcacccagcttggagtgtagcagcacgatcatggctcacttcaaccttgaactcctggcctccagtgatcctcccacctcggcttcccaaatttctcggattacaggcatgagcccccgaacctggcctaacaggtctcaatttggggttcattaggtgagagataaggaagcaggatgattcctaggtttctgtgttgagcagaccatctagaggaatgatgggaccatccactgagacgaaaagatgggagcagagcaggtctggagtaggactccatttgtgatccattgccttggagatgtatttggacatcacaaacagacatctcggagtctggagctccaaggagaggtctgggctggaaatatacatttgtgagtcactggcatatagatggtatttaaagccacgagtatggatgagatcacctaggcagagaatatagatagcaagacaaggccccatgctgagttggctggagaaggagtcctgagaactggtgagtgtggttccagggctctgagtcagggacaggtgcacctgctgggaggcagacggaatggaaagagagagaaccatttgatttggcagattatgagctcttttgtggacttgatcaaagcagcttcagtggattggtggggactaagccagattagaagaggttgaagaattggctgggcgaggtgactcatgcctgtaatcccagcactttgggaggcagaggcaggcagatcacctgaggtcaggagtttgagaccagcttggccaacgtggtgaaaccccatctctactaaaaattaaaaaattagctgggtgtggtggtgggtgcctgtaatcccagttactcaggaggccgaagtgggagaatcgtttgaacccgggaggcagaggttgcggtgagccgagatcgcgccactgcactccagcctgggtgactgaatgagactccatctcagaaaaagaagagattgaagagtccattaaagatgagggagtggagacagcaggtgtagatgacccagagttgcccgtctactctagaatgatgcgcatctatgagttctctcccttgtcattcttgaggtcagggaccgtgccgtggtgatttctgagtcataaatggagtccagccagtgcgtagcaggagctcagcacgtttatgtcatggatgaataaatgggtgaatggataatgcattgtttgggtcaaaatggcctttactagtagagatagcttaatgtttttgaagcatttgaggaaacaaaagaaagtcaaccccaaaggccataggttctgtgtcccttctcccagctaacctcaaggagcagttgcctgtgggcctggggcacgagccctggcccagcgtcgggaaccaggttatttatttattgagacagagtctcgagtgtcacccaggctggagtgcagtggtgcgatcttggctcactgcaacctccacctaccgggctcaagtgattctcctgcctcagattcctgagtagctgggactataggcacgtaccaccatgcctagttaatctttttttttttctttttctttttgagatgaaatttcaccctgtcacccaggctggagtgcagtggcgcaatttaggctcaccgcaacctctgcctcttgtgttcaagcagttctcctgtctcagcctcccgagtagctggggctacaggcgcatgctaccgcacccggcttatttttgtatttttagtagagacgtggtttcaccatattggtcaggctggtcttgaactcctgacctcaggtgatccacttgcctcggcctcccaaagtgctgggattataggtgtgagccaccgcgcccagcctttttttggatttttagtagagaggagatttcatcatgttgggcaggctggtctcgaactcctggcctcaagtgatccacccatcttggcctcccaaagtgctgggatcataggtgtgagcaccgcgcctggcccaaaaaccacattactgagtcccttctgctgcctctcacatgccttgtggctttggataaatcccttcctttttcttagaagtgatctgcatggcggctcacacctgtcatcccagcattttgggaggccagggtgggagaatcacttatgcccaggagtttgagaccagcctgggcaacatagcaagactccatctctgcaaagaaaaaaagaagtaggctgggcgcagtcgcacacgcctgtaatcccagcactttaggaggccgcggagggcagatcacttgaggtcaggagtttgagaccagactggccaacatgatgaaattccgtctctactttaaaaaactacaaaaattagccaggcatggtggcatatgcttttgatcctggctactcgggaggctgaggcaggagaatcgcttgaaccaaggaggcagaggttgcagtgagccaagatcgtgccactgcactccagcctgggcaacagacagagactccatctaaaaaacaaaacaaaacaaaacaaaaaataggcaggtgtggtggtgcacgcctgtggtcccagctacttgggaggctgaggtgagaggatcgcttgagcccaggaggtcgaggctgcactccagcctgggtgacagatagagcaatatcctgtctcaaaaaaagggaagccatcagcgcagcacaggggaagcagcccacgtgagccagtcccatagatattcgtttccctccttccccacccccgccccgctgccccctttttttctctctctgggctttttacttgtttaggaactcgaagcggttcatggcaagtaccccgagtcctagcccacctgctctctgcatagggttgcggcagagcacctcacacgcgcagatacacgcctggctttaggggaagtcgcggcactgggtctgcagagtccgctgagcacgcaccttcgttgtgaaactaaggaaaccctggagtgtccttgggcttgggtgggatggaacatgcccgtgacagacaggcccacctgccaatcagaagggcgctctccttagctgggatggggccgcaggagtggaaatggctgttgggaggtggcagagatgggagatggggtggccacgggggagccgccggccacagaagaggaaacggaggtgcagggagcggagtctgcgaaggacgcgtggatggccaagagatgtgcctcggaaagggccgagggacttcctctgaccaacccccgacggccattcccagccatccgttttcctgcagccgcggatgcaacctgtggaagaggcgggaggaggcccgggagtccgccccgctgcgcctttcctagggtgggagcgtggactcaggcgcggccgctgctgccacctagtgggagacgcctgctactcctctcggttcctaaccccagggtcgttcccggctgagcactaaggagggggcgggggaggacggagagagccctgtgcccctggatctgcggataggatgcaagggggagcctcagagaggaaccccccccccaggaagtgtgcattgcccacactacttttcccctctgtgccgtgatttcctcccgtgtataagggaggcaagagtacctgcctctgggctgggcttggtggctcacgcctgtaatcccaacactttgggaggccgaggcaggcggatcatccgagttcaggagttcaagaccagcctggccaacatggtgaaaccccatctctactaaaagtacaaaaatcagccgaacagtgatggtgcgcgcctgtaatcccactccaggaggctgaggcaggagaatcgcttgaacccaggaggtggaggttgcagtgagctgagattgtgcgtctgcactccagcctggcggacagagtgaaactccatctcaaaaaaaaaaaaaaaaaaaaaaaaaaaaaagagtacctgcctctgagggtcagtgcaagagcaaatgaacaaatttgtgcaaggtacttggccataaatggggtccagccagcatagtaataggtgttcaataaatgctacctgctgggcatggtggctcatgcctgtaatcccagcactttgggaggccgaagctggaggatcacctgaggccagaagttcgaaaccagcctgggcaacatagcaagccctcatttctacaaaaaatgcaaaaattagccgggcatggtggcacatgcctgtggtcccagctactcaggaggctgatgtgggaggatcacttgaggccaggagttcaaggctgcagtaatcataccactgtactccagcctgggtgacagagtgagaccctgtctctgaaaatacataaaataggccgggcgctttgggaggccgaggcgaacagatcacctgaggtgaggagttcaagaccagcctgaccaacatagtgaaaccctgtctctactaaaaatacaaaaattagccgggtgtggtggcagacagataaaaggaagggatttatccaaagctgtaatcccagatactcaggaggctgaggcaagagaatcacttgaacccaggaggcagaggctgtagagagccaagatggcgccactgcattcccacctgggtgacagacagagaccctgtctccaaaaaaatgaaaataaataaaacaaatgttacctgtggttgatccaaggggtaaccggaggtgtgtggccctgtgccaccaccccaaattgtgcctgttgtccaaacacagcttcctttagttcgggctttcagcaagatggccgtgccgcatccctcctctttgtaaatgctggggctgccaccattatggttttatcatcagcgacattccagggggtgaagactggtcccaacctctcttctcctctcctcttctgatgagagtgagggatgggggaggggtcccagctcctagcactttctcccctcaccccaaagtgccatcagaacagctctgggctgtgacatcacagagcccccacctcatgataggagtcatgaggctgtggccatgggtgctggtgtgggtgtggctggctgcactaggggccatagaaactggtaagaagctgtcttgggagcagcaggaaggcaggcagctctgggagcataaagtgtgatgcccacttagggactcggaagccaaccctgcaccctctcattttctctccactcttctctcccatcctgctggtcccacctaccccccaacaaccgcgagccttgtcgtggtgcacccagctgaccctgagggaaatcaagaccctccacagcctctgcaataaggctgggtggtctcacagggtcccaagtcagcttccgcctcgagagataaaggcaggggtcagcttggctgttgtcacagagtttgcttgggtcctagcacccagacccaagcgtgccacggcgtcagccctggggacagagtctccgcgcttcttagacagacctgacttcttcgattatccggactcagaccaagccaggctgctggctgtggcccagtttattggagagaaacccatcgtgttcattaactcaggtatgaaccagcttgagaagggacctccctccccgccagggtctggaggagagcagccccagacccttcattgggccatcagaggggagttaagggtcctgtttgtctagcaggttccagccccgggctcttccatcacatcctggtgggcttgctggtggtggcgttcttctttctccttttccagttctgcacccacatgtaaggcctgccccctttctccaaccccacccaccaccaccttccttgggagcggctgaagaccccagttctagcggggcaggctgtgacctctcccctctgatctccatgccccacagaaacttccagaaaggggcctaaagagccggacaagggctctggactcaacctgagcacccacacccacctcctctcctgttgatgagcaaaagttccctgctttcctcctccctgactgcccagcgagcagctggggatcctgtcccctctgtttcccatggcccaagccccccacctcctcccttcccagccccaaagaacttggtggcaagggccttggtggcgttcacgcagatcgtcttttattagcggtctgtaaagcacctcccagggtcccccgaccccagattggaggaagccttgagaggtcagtagcaccagggacatggcagggcccgagggcgcgatgtgcagccgatggtgagggactgggcgccctcgcctgcccccggggttgtcagcactgggaaggcttgggggtagcagccacctccttcccccaacccaacagactagttcaaatttgggtaaataaataaaataaataagattcctcaagctggcctaccctggagaggagccgtggttgcagccggccactcgggaggcccgagggccagcgggggttagttggggcgtcctctcctctcgggtgatggggagccctgggggatggcagcataggggctgggatggccttggcagaggcgtctccccacattctgactcctggtccccttgaaaccctgttggtgtccctccccacaagccctcctgccctcagtgggtgggaggcggtgccccctcccctcctccagcgcaagggtgtgcaggaagggggcagagtagggggaagaggtcccctctctccaccccctcagtccccgagagatggggcctcttccctttcggggtcatcgtcagtcctggggttgtccgggcaagaggaccctggctcccaaccccagccatcagccccagagccctgtctccacgggggtgggggtggggagggggagggtcccggcccccggcctcagtcctgggcctggcaggccgggggcggccgggagcggggccagaagaggcggcaggccccacggcagatgaggaagaaccagtagagctgaggggccaggagcagcgcagcgcccaggttgacgtgggcagggatggccaggggcacggccagcaggggcaggccggcatggcgcccgtaggcccagtacaggtagggaaagagcagcacccggcagcagaggaagctgagcagcatcagggccccgttcaccttgtgcagcagtgtgtgctgctgcttgtactgaggagacacagacacagtggccacggcagcagaagggctcggccccccttggccctctccctgcctccctgcgaccctagcaggcagctcctcccaaaccagacactttgccaggacacaagcaccaggtgctcaaaatgcacggggtgagggggggatgacgaaggggctagagcccttggcagcaaccttgaaggtccctccccttcctgtgacctccccattgggctcctgcaccctcccatgctcactcacctggatgaggatcttgccaaggcagacgaagggcgtgctgacctctgccatcaacatgcaacccagaaagaagtctcccttaccctgtcgccacacctgggcacagaggcaggaaggtgaggagctggggctctccctgggttcttgggcagcccccgcccttcctctttcccctctgtcactttgggagatgcttgactctgaacatcagaacacctgggtgcagggctgggtgcagtggctcacgccggtaatcccagcactttgggaggctgaggcaggtggatcacgaggtcaggagtttgagaccagcctggccaacatggtgaaaccccgtctgtactaaaaataccaaaaaaattagccaggcgtgttggtgggcacctgtaatcccagctactggggaggctgagatgggagaatcacttgaactcaggaggcggaggtttcagtgagccgagatcacaccactgcactccagcctgagtgacagagagagactccgtcttggaaagaaaaaaaagagaaagaacacctgggtgcaggagcaggtgcatgacttggctgcatccctctcacggtcctgcagaaagactgtgtcccttatgtaacaggtgaggaaactgaggctcagagacgtgcaaccacaaatccaaagagccacagccgggcatcgtccagcccagggccaggctgcccccacaccctggtgccctgggctggtgctcagtgaaccctgcctgtccacagctttccctgggaatacgctgggtctgcttggttgtcagtacgcagacccggggcttcccaggctcctgccagcaccagcaggaccaaggagcaggccacccgcaccccgcccgcccagctccccgggactcaccactgagagtgggaagcacaccagcaccatggcggcatggtggagcaccatgaggaactccttgtgcaggtagccacgcgctatggcccacgtgctgcccggggctctggccgctccgtcgtcccctccatgccctttgacctggtgcttgtgccagtgacagaggaacatggcgtagatgtcgtagatgaagtagggcacagcaaattgcgtgtaggcagaggacagccagtgtctgttgggcagagagacggggtgggggagcaaggaggaaaggggacaccagtgattggggtcagatctcaggggtcagcacagcagccctggacaggagcggagtcttgggtacagatgagggatccagagggtagagggtgagaaacttgcccaaggtcacacagtcatgcagctagtaagagatggtgctgggattcaaacctgtggtctcagaactcacccatgttcctctctctctgcagtatagtcgggggaaaagaaaagaccagaagatgcccacagaccaaaaggcacagatacagtgccaaaataagcccaggacaggcaggtgggaccttgccatggttatttgtcctaaccttaccatgaggttaggaccagcaacagctgaaggggcgagagtgctggagagagaggtcacaggggtggacgcccattcctgcctcctgggacaggcgatcttccaaacttcccatgcatagccttatttacccctcccaaaaccctgtaaaaggtaggtgtggccatcatccccactgtacaggtgaagaagtgagtcacagaggggctaggtaacctggccaaggaagggacatgggcggtgtggctccacagccctcactgtcatccccaccatccccagaagatccgagaggcatcagagacagaccctgttggcaagtgagaggtcttgtcagcgctgttcgccctgccccaaagtcacccaatctcttgtctattttgtgttgtttttcagggacagccaagcgttaaggggaaaatgcagagcaaaaggagccaaggacaaagaaagttccatgtacttggagagtaaacaaaaacgagaaatggatgaatagacaagacagcatttttcttctggagtcagcacattggcagtttctcttaaatcctgtagtcccaagactggcctggggtgggggcaggaggtcagagaggcaggacctggggtgctcgccccacaaggggtggagggatgaaagcagagtcagccagaagccatcaccaaacatgaggcacgtggaggaggctgtggagaagttggggctgaggcctctgaggatggggagcctgaggcaggcggcctgtgagtggagccaacccattctccagcagggacggtaccagggaaaagggaacctgagactggtgcagtggtgtggagctgcggcccagaggcagggaaagatgagaggggaggggcagctgtagagaacgcgaagcgggaacacagggagagaggtcccaagtggcctggaggagtcagggcaggaagctgcccagaatgcaggcccagcagaggtgatgggagatgggacagctgggctggtgcaggagaccaggaggggccaccaggccctgggctgtcatgtgaggtgttagatcccatccccaccctcttggcaattaggtgctcagaagtaggaacagctgctgccctggattaacccggatcctccccacctacctgaggattaaagcagggaagacggacaggaacagacacaggggggcctggggagcagggggtacagaagctaaacggtgacctctgcatgtgaaggctggggaggaagtgctggatcccaggctcagcttggagcaggggagggaaggggtgggcagaggccaagaagcagccaagtccctgggcggggtctgaagaaagagttaagccaagaactgtcctctgcagctgccacttaactcaattcctctcgctgaagcccttccaggaagggccgctgcctcaccacagaagaggcaactcatcttcgggaaaagaggaggcaaacagaaacagggcaccccccatcaggggcgtccaaatgttccctgggactcagtggctgccacagaagggaagcggtgctgaaagctacaaagggggcgttgtgggcacctctaaggcaacttgcaacgggccacccgtgggtcacctagggcggccgtcagcaccacggacagggcccctctcctccccgtccccccgcctcctgcctgcacacctctgggcctttttggcaaccaccagacactgcagcagctgcctggccacattttggcctcttcaccctcatcccctcccgcactgcctggccgtgtgtggccttgtgcgtgtcatctctcccttgtcctctccctcaggcatggagtggatgccggatgcctggattatgggaagggctgaggggtgagcctggcatgaggagggggcaccccatctgggtgctggctggaaatggggtctgcctcctggggtggaaggcagggaggaggtggggaaccacgacaacacgggagacctggaagccgactagaaagcgctttgaggatcctctctgatccccgctccttctccccctggttctgacctttaaggacaggacaggataaatttatccctgggtgttgagttgcggttattgcagttaacttgctcaggcccaagttaagggcttggggaccacagacagagttccctccaagatgtggggtcttccgggattacccgtacacgccaaccactggcacctgggcaggggggtgtctcgcagcacttactggtcatcaatgatgtgcttgcaggaggtggagacgatgtagccggcagtggaggccatgatggcctggacagaggacaccagcctgggggagagagggaggcgtgctagaaaggcagaagggaagaggcgtgtgccttgatttctcctcgttgctagtctaacgactgcgctttgcgttcagccacttctcgggccagtccttgcctgccttcgcccaaggctgggctgcctgaggtgtgccccaccacaggtacctcacggctctccggcccgctcggctgctgttcctcagtccaccccactccttgccaccttcttccttccccatttgtggaaactgagtctccctcttctcaagcccgcagggtgtctgtcctgaggtgagactgagagtgaactgctggcctggacctctccccacgaggggagcctgggccggttcttgccccgcttagctgtccagtcatgacgcaggcctcactctggaccctttgtgaccccgagttccccagtcactttcccactgtctcctgactgccaccagcctccactctgcactctggccctgttctaggggtgtagagttgtaccatccactcctccatccctggcccccaaacactcaccctgaatgacacctagctgtctggccctggcctcagtccctaatgtcttataggaatgtcttcgccgcatgctggccctgttttggagggtgggagggtgtacggggaagaagagagaggcgggctgaacactagtagaccagatggccgggctggatgaggtctcccagaacagtgagcaaggcaggcagtgaggagagaggaagcctgggggtaaagccccggacccccacaggagctcccagtcccccaccgctgagggtccagagaagtgccaggtcccttccattccctgagaagcccaagaagcagacaggggctgaggggaaagaaagtggtttacctggctgagacaatgactgcgtcggcctcctcccagcgtagctggggcagccgctggagcgtgttcttggagaggaggaagagtccggggaacaccacccccccggccaccatcggggtcagcatggtggctcaggacttgggcagggaggcaggcgggccgtgaaggggcagggaggccgagtggaaggagttaggggtggagaagggacgccaagcccgggaaggagggagaaaacgatgagaaggggcacaaaggggccagggcggggacgggatggggccagggagtccgatgaaactggggagtcgggagggggctggctgggcagagacgggggaggggaggatgggagaaggggagcaggagcaggccagcgagggatggggagaggcaaagaggggatggcttggtgagggacagagaggaagaggggacaggaggaggaggatgcggatgggggaggggagggagccaccaggcaggtggggaggggaggcttacgtgagaggctgggagggcccgaggaggcggggagggggtgggggtgggtctgagtaccagccccaaaggaaggaggtgggcgggagggagcggaggagcagccgggcaagcggtcagcggtcaccaccgctctcctggctccactgcctcctctcgctgccgccccagtccctgccgcccggcacagacaccgcacatggcatcatcatagagactccgtgcccagccccctgccccctcggtggggagggggagggggaggggaagtggccagcttggggaggacgggggaggggcaggaaaatgatggcaccgaccagacaccgagaaaccggacctgcagcggcgtctccccatgcagctctgagccacagccgcggctgcgacagagatggggggagcagagaaagagggagggggaggcccttaaaggaacagcagctgcggtggcacagggggctgctggggacaggggacaggggccagctcttctcttggggaggaagggggcccagggctccttggccagctgggagggggccctgagcccccacaggggcctgaccctgcttcccatcagcactttgcaaatgcctggcatctcctccctcaccaagccatccctctgtggcctgccccgggtccgagctttgggtggccattccagcggaagagagcgttccctgggagagggagtaagtggtgctttctcagaaggaagagctgaaggaggggataggagcaaaaacatctcaacacagcatcctcagagccagaggccccctcacccgatggcggggaaggaagctgacattggccagagggggcacctgactgtgctgcagggctgcccatgtcctgtctgctgcaggagctccgaggtcactgcgtctgtccttcccacagggccatcaacgatcctgaggctccctgaggtcacccagttcagaagtggcacagccctctcattgcaggcgttggaggggcaaggagtggaagaaggggaaacggtggcgagagcgcggggcagctgcctctcaggaagtcccagggagccctaggatgcccaggccctgttcttcagactgccagcccctcctggccttctctaaattcccacccctcactttttcctcagtttccttaatgctactagctcccctttctctgcaacttccacatacagcctagtttcagagtgggaaaggactgcggggtgggctggtgcaagctcctcactggcccataaggaaagtgaggcctggggactgggcccgggtggagctgtgggacctgagccagagacactgccccctttgacttctggcctcccatcctgctcccaactgtcctgtggacttcagcatgacaagggcctgttatgcaaactcctttggtctccaagttcaatagtcaaccctatggtttgcctttctctgccagagcccactcctcgcctcccccaaagaaaggccagggactgggatttgctgttttgtgctgccctctagcggcaatctgtaggaaagcacccaagaagtctcacgctgatttagagacggttgtagagacaatagcggacctagctcctgtcctcagcccttcacgggagggggaaaggggatccagctccctgagtttttactacatgctgggcacagtaccaggtgatttctactggttcttacttggtatccctgttttacagaagaaacaggtttagaaattttgtggggttttttttttttttttttttttgagatagggtctcattctgtcccccaggctggagtacagtggcgcgatcatggctcactgcaacctcaacctccccgggctgaaatgatccttatacctcagtatccccagtagctgggactacaggcgcacaccaccatgctcagctaatttttgtattttttgtagagatgaagtttcaccacgttagccaggctggtctcaaactcctgggctcaagcgatccacccacctctgcctcccaacatgctgatattacaggtgggagccaccacgcccggatgaaagctgggtttcaaacccatggttgcagccgggcaaggtgtctcacacctgtaatcccagcgctttgggaggccaaggctggcgaatcatgagatcgagaccatcctggctaacacagcgaaaccccgtctcttctaaaaatacaaaaaattagccgggcatggtggcatgcgcctgtagtcccagctacttgagaggctgaggcaggagaattgcttgaacctgggaggcggaggttgcagtgagccgagatcgtgccatcgcactccagcctgggcgacagagcgagactccatcttaaaagaaaacagaaaaaccaaaaaaccatagttgcataaccccaaagccactcatgagcaaaactgcaaaaaggacagaggctggggaggctgggtgatgggcggccaccgtaactactcgattgaggactacaaggctggtcatggaactgtggtttcactttggatgagtagagacaggctttttttgtctgccagggaatccacgtagacaccctagtaaaatctgtgttccgtgtacctcctacgcctcctgtggtttgctgatactgcacttttatggtaagctttgtcacacaggtcatagatctgcagcccaagggcccaatccggcccacagacatgttttgtttggccagtatgcagttgtcagtatagtagttcttaaataaattcttagttacttatcagtattcaagaattggaagaggttgggcgtggtggctcatgcctgtaatcctagcactttaggaggccaaagtgggcagatcacctgagatcaggagtttgagaccagcctggccaacatggtgaaaccccgtccccgtctctactaaaaatacaaaaattagccggacgtggtggtgcacacctgtaataccagctactcgggaggttgaggcagaaatgttgcttgaacttgggaggtgaaggttgcagtgagccaagattgagccactgaactccagcctgggcaacagagtgagattctatctcaaaaaaataaaaagaattgggagacagcccaccacaatgacatgcacctgtagtctcagctactcaggaagccaaggcaggaggatcacttgagcccaggagttcaagaccagcctgggcaacatggagaaaccccgcctctactgaaagtacaaaaattagccaggcatggtggtgcacacctgtagtccaagaaactcaggagtcagcccgattctcagggagaatcacttgtcagggaggtcaaggctgcagtgaatcatggtggtgtcactgcacttcagcctgggtgacacagtgagactctgtctcaaaaaaaaagaagaggccgggtacagtggctcatgcctgtaatcccagcacttcggaggctgagaaggaacaatcctgtgagcccaggagttcaagactagcttgggcaacatagtgagaccctgtctctaccaaaaaaaaaaaaaaaaaaaattagccaggcttggtggtgcattgcctgtagtcccagctatggcaggaggattgcttgagcccaggagttcaaggctgcagtgagccatgatcgtgccactgcactccagcctaggcaacagagcaagaccctgtctcaacctgtctcaacaacgacaaagaatcataactccgaaaatattggcccacgttctaaccatataacattatcagtggctggagctgagcagcactggccctcagcagagaaggtgagtcctccagcctatatcatccctgcagagcccacagccctcatattatctgcagcagttttcaacccctgctctacagacgctgattcatatgatcctcacacaacatctccacgaagaaaggaaagtggggtgttattattaagcccatttaccagtgagggatctgaagttcagagaagttaaatgactcacaaaagaccccactgttggtgtctttttttctttttcttttttttttttttgagacagagtctcactctgtcacctaggctggagtgcagtggcgccatctcagctcaccacaacctccacctcccgagttcatgtgattcccctgtctcagcctccagagtagctgggattacaggcacctgccaccatacctggctaatttttgtatttttagttcagacagggtttcaccatgttggccaggctggtcttgaactactgacctcaggtgatccacctgcctcagcttcccaaagtgctggaattataggcgtgagccaccacgcccagcctgctggtgtcttttgactccacattccagctccactccacactctgcttctgctttcaccacaaactcattctgaaagtaaaagatcagttccaccagccatggccccaggaaggacaccctcaccctggtcctcttacttggatgctaccaggacagcctcttgtctctccatctgcaggttggtgtggttctgcaagccccagcgcagggcagtgaagcacaacgggaagaagacgcaacccactgcgaacagcagggtcatgcctgcctgcagccaagaaggcagaaaaagacggccatgagaacacctcaacacaacaccctcagaccccccagcagccttcttcacccccaatgaggcaagccccaagagacccatccatctgtggccattgaaagccaccaggcaaacctcttctctaagctcctagcatccttattactcttttaatattcctcatccggggcaattcgacatcctaattatcccaattttttgttttaaacactcaatttagacaatttcttttcttttcttttcttttcttttttctttttttttttttgagatgcagtcttactcttgttgcccaggctggagtgtggtggcgtgatcttggctcactgcaacctccacctcccgggttcaagcaattctcctgcttcagcctcctgagtagctgggattacaggcgcccgccaccatgcccagctaatatttgtattttcagtagagacaggactttactgtgttggccaggatggtctcgaattcctgacctcaagtgatctgcccgcttcggcctcccaaagtgctgggattacaggcatgagccactgcacccagctcctcctactcttaaactccaccattttccatcttctgcatgccccgcccgccgcccaccctaagtcacctctaccttctccccagtcctcacctcagagggacaggttggaagacagaaagggaggttgatgtttctcctcagcacccagaacttggaaaaaggaagggagggggttgtcaagatatttggaactttaaaatgacatttgttgaaaaaacaaaataaagccaaagcgattgttgttccattaaaaaagaaaacaaaagaaataacaggtgcaagcctgaaactacatatatttacatagatatcatttttgtttagaaagacctcccctcccatctactctggggagcagaggtgtggagcaggcacaggcaggatgaagggaaccaggtcctgccatcctgccttcctgaagtgtcttccaagggaccttctcgggataaaaggaaggtgtcaaactgcaaaggcacgaggctgctctgtagaggcagttggggagggcaggagtatgctcttccattggtggagtggctagaaggtgccatcctcctaatggcccgccagttgatacatgtgccctatcatttgcttcctgtgggggctggggggcggttccagcaagccttgcctagaattggccaattagaatccattggtgacttgatggacagctatgtttcagggacagggctcaaagaaagaaaaggagaggggaaataagagcaggtgcagggccgggcgtggtgactcacgcctgtaatcccagcactttgggaggctgaggcgagtgggtcacctgcggtcaggagttcgagaccatactggctaacatggggaaaccctgtctctactaaaaatacaaaaattagccaggcgtgatggtgggaacctgtaatcccagctattcaggaggctgaggcaggagaatcgcttgaacccgggaggcagaggttgcaatgagccgagatctcgccactgcactccagcctgggcgacagagactctgtctcaaaaaataaataaataaataaataaataataaaataaaaaaaaaacagcaagtgcagtggttcaggctggaatccccgcacctcagagaccgaggtgggaggatcacttgaggccaggagttcaagaccagtttgggcaacatagtggaacccctgtctctacaaaaaattagaataataggccgggcacggtggctcccgcctgtaatcccagcactttgggaggccgaggcgggcagatcacggggtcaggagatcgagaccatcctggctaacacggtgaaaccctgtctctattaaaaatacaaaaaatttagccaggcgcgttggcgggcgcctgtagtcccagctactccggaggctgaggcaggagaatggcgtgaacctgggaggcggagcttgcagtgagccgagatggcaccactgcactccagcctgggcgacagagcgagactgtgtttcaaaaaaaaaaaaaaaaagaagaagaagaagaataaaatagtccagtgcaatgacatatacctgtggtcccaggtacttggaaggatgaggcgaaagaatggaaagaattgcttgatcccaggagttcaaggctgtagtgagctatgatcataccactgcactccatcctgggcaacagagtaagaccctgcccccccaaaaaagtagtcctaagtaattattgatttaaaaggcggtgtaggataaaaggtaaagaaggccatttctactgtgggtgtacatggacttcaaattcagagtccacagataatcaaagaaacatttcacttccctattgctgaaataaagaaacaaataaagaaacacactgtatggctctgtttacatcaaattcagaaaagcaaaacatctatcatgaaaaatctgaacagcgtttaacttggggaaggtattgactgggaggagaccccagggaaccttctgaagtgttggaaatggccttatattgatcaccagtgtatacatatgtaaacattctcgaggcatcctcttaaaatgtgtgccccttaagtgaagctgcagtttttaaaattctaaatttaggctcttcctttctctgaatgatggtgggcaaagcctttatgggcctcaatttcttcatctgtgaggttgggttaataattagtgtcacatcattaaatgctgcttagactacaggtcagacattgatctgcattctctgactctaaaagaaaaaaaaaaggccaagtgtggtggtgcacacctgtagtaccagcactttgggaggccaaggcaagaggatcacttgaggacaggaggttgaggctgcagtgagctttgatcacgagactgcactccagccttgggccacagagtgcgactccgtctctaaaaaaatcaattaagggctgggcgcagtggctcacgcctgtaatcccagcactttgggaggccaaggcgggcagatcacaaggtcaggagttcaagaccagcctgaccaacatggtgaaaccccatctctactaaaaatacaaaaattagctgggcatggtggcatgtgcctgtaatcccagctacttgggaggctgaggcaggagaatcgcttgaacctgggaggcggaggttgcagtgagctgagaagccgagatcacgccactgcacttcagcctgggcgacagagcgagactctgtctcaaaaaaaaaaaaatttaattaaaaatatcaagtcatttatccaaagcaaccttgtgggtagggattattactgcacctctgttttacagatcagaaaacagaggcacagagaggtttggtaacttgtccaaggttaaacagtcaggaagtgaataaaaattttttaaaatcatattttctgaatttatttgtccctataatgttaggcagatatagaaaacataaacttattttcctaaggaactgaaaggcttttttaaaaaggagggaaaaaacaccactgaatacaatttagacatcctcattcatattttcagaacttatccttctcctcctccttcctctcttttttttttttttttttttttttttttttagatggaggttcgctcttgttatccaggtatccaggctggagcgcaatagcgcaatctcagcttaccgcaaacgtcgcctcccagattcaagcgattctcctgccttagcctcccgagtagctgggattacagccatgcgccaccacgcctggctaattttgtatttttagtagatatggggtttctccctgttggtcaggctggtctcgaactcctgatctcaggtggtctgctcacctcagcctcccaaagtgctgggattacaggtgtgagccactgcgcccggcttcttcctcatattcttttgagacagggtctcactctgttgtccagactggaatgcaatggcatgatcctacctcattgcagactcaaacttctggactcaagcaatcctccttagcctctgcctcagcctccagagtagctgggactacaggtgtgcacacaacactcagctaatttttgtatttaaaaaaaaatttttagctatgttctatggaaaggaatctttgtactttttatagagatggggtcttgctatgttgctcaggctggtcttgaactcctggcctcaagcaatccccttgccttggcctcctaaagtgctgggattacaggcatgagccaccatgctcggccagtgtttgcttctttagctactttattttcttccctctggatgggactctgaaaattaaaagttaaaccaagagcggccaggcatggtggctcacgcctgtgatcccagcactttgggaggcagaagggggtggatcacctgaggtcaggagttcgagaccagcctggccaacatggcgaaaccccatccctactgaaaatacaaaaattagccaggtatggtggtgcacatccgtaatctcaatcactcaggaggctgaggcaggagaattgcttgaacccaggaggcggaggttgcagtgatccgagatggtgccactgcactccaatctgggcaacacagcaagactttgtctcaaaaaaaaaaaaaaatatatatatatatatatatatatgaaaagatcctgagctggggtctgaaaccaggcagcctgccctgctatttgcccagctcctgcatagctcattgtgaggactaaatcatgccaatgcatagaaactacaatacttcacacggtagccagtagccagttactgtcattctgagcacccactgtatgccaggcaccaggctgaaatactttatatacatgttcccgtttaatcatctatgccaccttacaaataacttcctcattttactgctgagaaatctgagtctcagaaaagttgaatgacatgcttcagaccatacagtacatgacaaaatcggtaaatgtgaccgctgccttccaagtctggagaaaaggaggcgaagagaggggaaggcatgaggggaggagagaaggtgggagagggaaaaaggggaagagaagggatgagagtaggagaggcagaaggagtgaggaggagtagcacccctctgcagttattttctttttctttttttttaaatttgagacagagtctcactctgtcacccaggctggagtgcagtgacacaatcacagctcactgcagcctccacctcccgggctcaagtgatccttccacctcagcctcctgagtagctgggatgacaggcgtgcaccaccacacctggctaatctggggaggtttttttttctagagatgggatcttgctatgttgcccaggctggtcttcaactcctgggctcaagcgatcctcctgcttcagcctcccagaattctgggattacaggcgtgagccactgagtgtgaccagggatggtcattttcctctgcacctgtgcttaccctagacaagaaaatgtggaagggaggaaagtttacaggccatgagctggttagagtcaggcccgagtctcactggaatctggactctctcctacatttcttcctttccttgtcgatttcttcttgttgagagcaaaacagtccaaggctgcacaggcttgtctgagagagaaaatatgagaggagaaaattgtggttttgagcaatggctttaaatttttttaatagtgacccacaagagatatcttttattttatttctttatgtatttattttttgtttgtttgttttgtttttttgagacagagtcccactctgttgtccaggctggagtgcagtggcacaatctcagctcactacaacctccacctcctgcgtaaatgattctcctacctcagcctcccaagtagctgggattacaggtgcatgctaccacgcctggctaatttttgtattcttagtagagacaccatattggccaggctggtctgaactcctgacctcaagtgagctgcccgccttggcctaccaaagtgttgggattacacacgcctgtaatttttgtaaaatacaaaaaattagctgggcatggtggtgggtgcctgtagtcccagctacttgggaggctgaggcaggagaatggcatgaacctgggagacagagcttgcagtgagccgagatcacgccactgcactccagcttgggccacagagtgggactctgtctcaaaaaaaaaaaaaaaaaagtgttgggattacagaggtgagccatggcgcccagccgagatatcttttattttgtgactgcagttcatgcacccacacgttgaatggaaaacctttgcacaacacattctgacttactatatgcagtgccctgtggaattttctagaccatttttccaccaaatattgatcatgacccattaagccaatttcactgcccactagtggctaaacaagccaagcgggaaaaatcttggtttggagagcagtgtttctcaatttttctttcattattgttcccctaaggagccctttttacacttttttttctaatcgctgcctatcacgaaagtttaataacacagatatatttatgtctatttacatatatcttttccatattaaaaagagtaagttttttgcccccttgggggcgatattataccagttgagaaggcatcattgtcctaatgctcattttctgagccgcctttatttatttatttacttatttattttattttattttatttttttcagatggagttttactcttttgcacaggctggagtgcagtggcacgatcttgtctcactgcaatctgcccccgctgggttcaagcgattctcctgcctcagtctcccaaggcgcccaccaccacacccagctaatttttgtatttttagtagagacggggtttcaccatgttggccaggctggtctcaaactcctgacctcaagtgatccacccgctttggcctcccaaagtgttgggattacaggcatgagccaccgtgccctgcctctgatccgcctttatacacatcaatcccaacatccaatgagataggattagttccattttgcaagtgattaagtggaagctgagaggttatattaattattgaagattgaaatggctggcaattagactgggaatccagaaacttaccaatatcctaactcagcctctagcttctccaaacctttgtttccccacaaaaaaaaacctcagttatggtcagttatgggtgttttttgttgttgttattgttgttgttgtttttctctatttgacctaataagagcaaacattaggccaggcacagtggctcacacctgtaatcgcaatgctttgggaggccgaggtgggtggatcatgaggtcaggagtttgagaccagcctgaccaacatggtgaaagcccatttctactaaaaatacaaaaaaaattagccaggcgtggtggcacacgcctgtaatcccagctactcaggaagctgaggcaggagaattgcttgaaactgaaaggcagaggctgcagtgagccgagatcagaccactgcactccagcctggtgacagagtaaaactccgtctccaaaagaaaaaaaaagcaaacatttatagagcatttactagacatccggcagcaatctaagccctttatatatattaactaacataatatccacaataatcttaagacagacatactggggtttttgttttgttttgatttttgagacggggtctctcattttgtctcccttgatgaagtacactggtacgattagctcactgtaacctcaaattcctgtgctcaggggatcctcctgcctcagcctcccaagtggctgggactacaggctctcaggctcatcactaccagcttattttttaagtttttcctacagatgggggtctcgatttgttgcccaggttggtctcaaactcctggcctcaagcattctcctaccttggcctcccgaagtgctgggattataggcacaaatcacgtgtcaggtgagacatactctcagtcactgttcggatgaggaaattgaggcacagagaggttgtgtggcttgctcaaggtcatgcaggtagaaagtggcacaagcggggatttgaaccaagtaatctgattttcagagcacaggttgtgcgttttgttttgtttttcaccatgtattattttttgagatggggttctcactctgttgcccaggctggaatgcagtggtgccatctcagcttcctgcaacctccatttgccaggctcaagtgatcctcctgcctcagcctcctgagtagctgggaccataggcaagccaccaccatgcacggctaattttttgtatttttggtagagacagggtttcgccatgttgctcatgctggtctcaaactcctgagctccagcaatacgcccgatcctcctgcctcggcctcacaaagtgctgggattataggtgtgaaccaccatggttagcatgagctaaccatgtccttttttttttttttttaactctgtctcccaagctaaagtgcagtggtgcgatctcagctcactgcaacctccgcctcccaggttcaagcgattctcctgcctcagcctctggagtagctgggattacaagtgtgtgccatcacacttggctaatttttgtatttttagtagagatggggtttcaccatgttgcccaggctggtctcaaactcccgacttcaagtgatctgcctgcctcacacctcccagagtgctgggattacaggcatgagccacagtgctaaactaaccatgtactttattttctttcatttgagatgaagtttcgctcttgttgcccaggctggagggcaatggtgcgatctcggctcactgcaacctccgcctcctgggtttaagctattctcctgcctcagcctcccgagtagctgggattacaggtgcctgccaccacactcggctaattgtttgtattttttttagtagagacagggtttcaacctgttgcccaggctggtctcaaactcctgacctcaggcgatctgcctgccttggcctcccaatgtgctgggattacagaagtaagccactgtggctaccatgtactttaaaaggaaactttttatcactctggaaaatagaaaaccagtaccacctgtgataaacagaaggtaacaaaaaatatacaaaatgaaaacacattttataacattctagctagatactatgggcagctgctcattctgaactggaggctggctctctccttgttcaaaaaagaaagatcaggccgggcgcagtggctcaagcctgtaatcccagcactttggaggccggcgggcggcgggggggtgcggattaactaaggtcaagggttcgagaccagcccctggccaatatggtgtaaccccatctctactaaaaatataaaaattagccgggcgtggtggcatgcacctgtaatcccagctagtcaggaggttgaggcagaagaattgcttgaacccaggaggtggagatttcagtgagccaagatcgtgtcactgtactccagcctgggcgacaaagcaagactccatctcaaaaaaaaaaaaaaaaaaaaaaaaaaagaacaaaaagataagcacagagagaaaggtgttaaagggtttctggcagcaaattgagagtttctcctgcagtaatcagaagcgttgaaagggaattggaaagagaaagagagtagcttgttcagggtgtgtgtgtggtgtgtgtgtgatgtgtgtggtgtgtgtgtggtggggtgtgtgtggggtgggtgtatggggtgtgtgtgtggtgtttgtgtgtgtttgtgtgtgtggtgtgtgtgtgtgtggtttgtgtgtgtggtgtgcgtgggtatggtgtgtgtggtgtgtggtgtgtttgtgtagtgtgtgtggtgtgtgtgtggtgcatgtgtggtgtgtgtgtatttgtgtgtgtggtatgtgtgtttgtgtggtgtgtatggtgtgtgtgtgtggtgtgtgtggtatgtgtggtgtgtgtgtgtggtgtatgtggtgtgtgtgtggtgtatgtggtatgtgtgtggtgagtggtgtgtgtgtttgtgtggtgtgtgtgtgtatttgtgtgtggtatgtgtgtttatgtggtgtgtgtatggtgtgtgtgttgatgtgtttggtgtgtgtttgtgtgtgtgtgtgttgtgtgtgtttgtgtgtgtggtgtgtgtttgtgtgtgtgtgtgtcttcttgctgacataccacctaaaataaacccaagatgggatgcaccacatactctgaacccttgtcgggtggtcaatgggtgttcaggacatcccagcagaggaagggagacacaccagcctgtcctggcctgggtgtgcagccagaaagcatggggccaggctgggcaacacagtgagacctcctctctacaaaaagtcaaaaaaattagctgggcgtggtgctgtgtgcctgtagtcccagctacttaggaggctgaggtgagaggatcgcttgagctagggaggtggaggccacagtgagccatgatcgcgccactgcactccaacctgggtgacagagggagaccctgtctcaaaaacaaaacaaaaacaaacaaaacatagagcattaggcagtccaccacgtgtggaggggcagtgcagggcaggggtataggagggcccatccaagcctctgtgactttggccaccatctttccttcccctagcctgtctccccaggtgagtttcacccccaggcagtccttagagacccgccacccaatttacccttggccttgagtttaccgttctctgttcttccaggttctgccgcccacaggctgtttcactcatcctctccaccgggtgccctgcggaggtgtgcaagtgtgatatcatcaaaggctgtgaataagtaaacaataagtggccagaagtggcctgtttcccacatgatacccagggaagggtccgattccccccgcctgggctctggggcaagtcctggctggcgtgccagagcatttattatttagtatttttacttacctgtcccaggttagggactgtcccaagcaatgccagtcccaccctctatctgcacaccagaaaaagctgagggcacagcaggtgattggagtcagacagctaagggtccaatccctttcttctcacatagactggctgtgtgaccttggccaaatttcacaacctctctgagcctccactgagcacacaccaagtcccattgccaggcctaagtcctgcttctgccagtcactagcctggcatccttgtgcaagggattcaactcctctgagccttgggctcctcatcaatgaaacagcagcacctctacctggggctgctggggtgattaaatgagatctgtgtaaagcacagttgctatacacatacgcattgtgatattcattaatagtcattcaaaatgtatatatttagagatgagatctcgatctgtcgtccaggctggagtgcagtggcatgatcatggctccctgtagccttgaactcctgggctcaactgatcctccctcttcagcctcctaagtagctagaattacaggcatgagccaccatgccctgcctgttgtgtcatctgtctgtctgtctgtctgtctgtctgtctgtctatctatctatctatctatctatctagcgcaatctcggctcattgcaacctctgcccccagcggtcaagcaatcttcccacctcagcctcctgagtagctggggctacaagcatgtgccaccgtgcctggctaatttttgctttttggttttgggtttttttctttttttgagatggagtcttcctctgtcacccaggctggagtccagtggtgcaatctcagctcactgcaacctctgcctcccaggttcaagcaattctcctgcctcagcttcctgagtatctgggattacaggcacgtgccgccatgctcggctaatttttgtatttttagtagagacagggttttaccatgttggccaggctggtcacgaactcctgacctcaagtgatccgcctgcctcggcctcccgcagtgctgggattacaggtgagagccaccacacccagcctaatttttgtattttttgtagagactgggtattcatcatgttggccaggctggtctcaaactcctgacctcaggtgatccacccgcctcagcctcccaaaatgcagggattacaggtgtgagccactgtacgtggcctataattttttttttttttgagatagtgtctcactctgttgcccatgctggagtggagtggtgtaatcatagctcactgtagtctcaaactcctgggctcagccctggcgtggtggctcacgcctgtaatcccagccctttgggaggccaaggcgggtgaattacctgaggtcagaagttcaagaccagcctggtcaacatggtgaaaccctgtctctactaaatatacaaaaattagctgggcgtggtggcgggtgcctgtaatcccagctacttaggagactgaggcagaagaatcgcttgaacccagaaggcagaggttgcagtgagtcaagatcgcacaactgcactccagcctgggcaacaagagtgaaacttcgcctccaaaagaaaaaaaaaaaaccaccaccaacaacaacaaacaaaaaaactcctgggctcaagagattcttccacctcagcttcccaagtagttggaccataaatacacatgaaaattagaaaacatgcatgtctaatttttcttttttttttgtagagatggagttcactatgtttctgaggctggtcttgaactcctgggctcaaccgatcctttcacctcagcttcccaaagtgctgggggattgcaggcatgaaccactgcacctggctatatattttaatgagccttcattctatgccatgtgccttgcatacattttctcaaataatcacagaaagccctgccagtccctgagggttatccccactttccacatgagtacaactgaggctcagtgaggtcaattgacttgtccagggttgcacagatatactgtggcagaactagaattcaaatccagatctttcctggttctaaaggctttttttttttctcgcccaggctggagttcagtgacatgatctcaactcactgcaacctctgccctctgcctccccagttcaagtgattctcctgcctcagcctcccgagtagctgagattacaggcatgcaccaccacgcccagctatttttttttctttttgggggcggagtctctgtctgtcacccaggctggagtgcagtggtgcgatcttggctcactgcaaccttcacctcatgggttccagcaattctcctgtctcagcctcccaagtagcttggattataggcacctgccaccatgcccagctaatttttgtatttttagtagagatggggttttgccatgctagccaagctgatctcaaactcctgacctcaggtggtccgcctgccttggcctcccaaagtgctgggattacaggcgtgagccactgcactggcctaaaggtttttttcgttttgtttccaactgggccattattatttccaacctataagatggaagtaattgtttctgccactcgtgcctcctgtaaggattaagtaagataaagtctgtggagaggcctctgttgacaccagctctagctcagcactgcttctttattcccccagggtaattacctaaacacaagcctttcattttatactaaggaggctggtgaacctcttcttaatctctgggagatgatatcgttggatgtccattggaggcagctgaaagtattagatcagaatcagaactgccaggtcccttcccacgtccaagcctgctgaagcttctttcatcttctgggaactctgcatctctgatctcccacccaccccacgattattggaagtatacaatcctgtctgccctttcctaggggaagtgcggaactacatatgatacatctgacatctccagcttccaacttcgggagaggagactttgcggttagctggctattgtgaagtcagtttttctctgcccccagcaaatgttgtgatgtggatagaagtggggcctcggcacagccaggcgcagtagctcacatctgtaacccagcactttgggaggccgacgtggacaaatcacaaggtcaggagtttaagactagcctggccaacatggtgaaaccctgtctctactaaaaatacaaaaattagccgggcatggtggcatgcgtctgtaatcccagctatttgggaggctgagataggagaatcactcaacttgggaggcagaggttgcagtgcgctgagatcgcaccactgcactctagcgtgggcaacagagcaagactccatctcaaaaaaaaaaaaaaagagaaagaaaagaaatggggccttggcaaagtggggtgcatacatcatcccttgtcttggcttgcctggcaacacacaagcctggggcactgcccgtgctcctgcataatgtatgagcccatggtaggaacaaaacaccagcaccagcgagtctgggcactgcaggccacggacgtgtccaggggccttgccaaggctgaagtctctctgttggcagaatatgcagaatatgtgttcctggaggccttttgtagggctgaggtgagaactggcctcaacttggtcctcaggattccatcagacaataagaccgcccaaggccgggcacagtggttcacgcttgtaatcccagcaattcgagaggctgaggcaggaggatcgcctgagcccaggagttcaaaaacagcctgagcaatacagtgagaccccgtctatacaaaaaattttaaaaattagctgggtgtcgtagcatgcacctgtagtctcagctacttgggagactgaggtggaaggatcccttgagccaggaggtcgaggctgttgtggtgagccatgattgtgccattgcactccagcctgggctaccgagtgagactctgtctcaaaaaaaacaaaaacaaaaacaaaaaccggaagacagcctaagaagacaatcttctttaggatcaataatggtgacattagcaacagctagacttctgttttctgggcttgaaacgccctctgagagggccaggggtggccaagagggtggctgagaccacctcagtatggttgacagtgggagggaagatttggatccagggacacagcccctggcagtttccgtggctgcctcatggtgtaggaaaccccaggagcagcagctgtggtgaggtatgttggggtggagaacatggacaaaaataggtatatggtggcattgtttttaggggaaaatgccaggattcagccatcgtttaggaagtcggaggcctccatagagaggggtgcttgtgtgagcgtgcatgtgtgggtgtgtgcaagtgtctgtgtgtgtgtgatctaaaaaggttaggaatgaaacggggaggtctgagtgccttgaaagccaaggaaattaggacgtgtggaaaacaatgcttcattcgtggatggtgtttggtttcaattcattcatagaatcagtgagtattggctgagtgcagtggctctggcctgtaataccagcaacctgggaggccgaggtgggaggatcatttgaggcaggagttggagactagcctggccaacatagtgagaccccatgtctactttattaaaagaaaaaaacaggccaggcgcagtggctcacacctgtaatcccagcactttgggaggccaaggcgggcagaacacctaaggtcgggagttcgagaccagcctgaccaacatggacaaaccccgtctctactaaaaatacaaaattagctgggcatggtggcacttccagctactctggaagctgaggcaggagaattgcttgaatccagggcggaggttgcagtgagctgagatcacaccattgcactccagcctgggcgacaagagcaaaactccgtttcaaaaaaaaaaaaaaaaaagaaaagaaaagaaaaaagaaagaaagaaagaaaaagaatcagtgagtattcaccaaggctcccagggctaggccaagtactagagctcaggatacggagatgactcagaccaggccccagacacttgcagtctaattgtggagccagacatggaagtgaggaattcaagtatcttgtgagaagtgcgagaacaacagtatctgtaggatgctgtgggaattcacagtccaaagcagccacctctgcctgaggttggcagggagacctcacagaggcaaaactgaggacgtgcttgagggatgaggaagaggtttgaggggaagacagagggtgttccaggcagagggatcagcaactgcaaagctgtggaaatgtgagaccctacacactggttcaggaagcttcagcagatcctactgaaggtggcttatgcctgtaatcccagctacctgggaggctgaggctggaggactgcttgagcccaggagttcaagaccagccttaacaacatagcaagaccacatctctaaaaattcagaaaaaaaggctgggcacagtggctcatgccagtaatcctagcactttgggaggccaaggcgggcgggattgcctgaggttaggagttcgagaccagcctggccaacatggtgaaaccccgtctctactaaaaatacaaaaattaggtgtgcgtggtggcagtcgcctgtaatctcagctactcgggaggctgaggcgggagaatcgcttgaacccaggagacataggttgtagtgagccaagatcacaccattgcactccagcctgggagatgagcgaaaatctgtctccaaaaaataaataaatcaattaataaataaatcagtaaaaaagaaccgggcccggcgcggtggctcacgcctataatcccagcactttgggaagctgaggcgggcgcatcacttgaggtcaggagttcgagaccagcctggtcaacattgcgaaaccctgtctctactaaaaatacaaaaattagccgggtgtggtagtgcgcgcctgtaatcccagctactcgggaggctgaggcaggtgaatcacttgaacacgggaggcggaggttgcagtgagccgagatcgcgccactgcactgcagcctgggcgacagagcgagactccgtctcaaaaataaataaataaataaataaataaataaataaataaatataaataaaatataaaaagtagcattgatgtttacaatatccctgagcggcaggcgtttctcccttttgcagatgctcagtggcttggccggagatacatccaagtggtgggtgtagcctgggggttcaatcctcctgtggcgccccagaacccggtgcctcctccaacgtccggcatctgatgaggatccgacccaggcgggcggcggcgggattcgctcttccccttcgctccccgcgagaaagccccgagggccgcggcggcgcagagccggtgacagttgaagcttaggcgggaagagggaggcgcgaggcgggaagagggagtttgggcctcggcagccgccgtacaaacaccgctctggtcaccatggcaacagcgggatgccgcgaacggcttctgggcggggccggtccctcggacgattggacctagcttggcgcggaatccgtgaattgcccgcggcccgagggtgcaggtgatgggtgctgaccgactggggaagcccggagtgtggggactgaggaggggagtggcctggggcgcgctggagcctgcgaggaaggcgccgcctcggatcccccgccccccattccccttcccgaattccaccctccggcccagccatggcctcagtttccccaaacaggaaagggaaggagggtgggcaccccggtctaacggtgcctctcagcctctgagacccagaaccttccttctgcagctcccggactgactggctctgcccttccccatggacgtaagtccgggccccttcccctctctgggccccctcagcgccctctcctaaccccgaatgggcctgtcttccagcacggactggggagggggcttctacccaacagagactacaacctgccagctcaggacgagagctgtcaggaagagtccaggaatggacttcccacgggagggcacatttctggtattcctggcaagataaggagttgactaagtaatccacgagaaaaggcatttccggcagaggaaacagtctgggggtgagagggaggctgcagcatttggggaactgctagggctatcgtgtgtttggaagagggggagggagagaggtaggcagggctaaattgggaattttgtcactgacataaattttaagtgccaggcgtggtggctgtcgcctgtaattccagctactgaggagactgaggtgggaggatcgtttaagcccaggagctcgaggctgcagcgagccatgatcatgccgctgcactccagcctgggtgacagagtgagacactgtctctaaaaaaattgaccaggtgcggtggctcatgcctggaatcccagcactttgggaggccgaggcgggcggatcacctgagatcaggagttcaagaccagcctggccaacatggcaaaaccccctctgtactaaaaatacaaacattagctgggcgtcgtggcgcgcacctgtaatcccagctactagggaggctgaagtaggagaatcgcttgaacccgggtggcagaggttgcatgaaccaagcttgccccactgctccagcctgggtgacagtgatactccgtctcaataagaataataataataaaataaataatagaaaaagttttaagtgagttactgggagccattgacggattgtaagggagggagggatactacacaaggacatctggtgtggaaaggggcaaaattgcaggttggatgacaggagccggtaatgtgggctgagggatggtaaaggagtggcaagggagtcagagacaagagatctctttggagaggcattccagaaggaaaatcagccctagaagactctagaatgctgaagtgcttgatgttgctgaactgggaatgatagggaaaaaggcaggctcagggcacaagataatgagtcagggtgtagtcctgttgacgctctccccaccatctggtggccgttcctctcccagccacctcctcgtccctcatggtattcccgtgttcctgcagcccctctccatctccttgtcaccccttcctcctgtactcgtccaggcctcctctagcccgtggaatccaaccccggctcctgtcagcagccctcccctgctgctccccatccctgccatcgtcttcatcgctgtgggcatctatttgttgctgctgggtctagtcctgctgactaggaactgcctgctggtgaggggtctggtcggggataaagggtgggctctggggaagaggaatcccggtaacctgtcccttcatctgcaggctcttaccctgagacacttgacatttagcccttgcatctatccgttttgtggtaccagggggtccctcctctcctgtccccagccaaaccttttcctttcccctcgggaaagctgccttggctgtcactacctgctgcctattccacatcctgaaccctgtgacctaggcccagggctgctgcgcggacggtagctccccctgcaggaagcaaggttcctccgggcccccagactgctgctggacctgtgcagaagcctgcaactttcctctgcctagcccggcccacttcctggatgcttgctgcccccagcccaccagagctgtgagttccattcctaccccctgccccactgagccctgatctaggtatgatcggtgcattcatttttttgctcaacaacatttattactgagcaccttctcaaggccaggcacggttccagggcatgaatcatgtgcagccaggtaaaaacaacctatcagataatgcctggtgatgaaagctacttgaagaaaataaaatagggtgccagctggagaaaggtgatgtgggtaacatgtagagtacatagccagcacttctaaatgaaagtgagctaaatgaaagttagctaaatgaaaaaacagctcacacagctcctttccgttcaccgaatgaactgtgttctaggtatagggcctctttacggacctttgtttttcccaacaaccctgagaactgagaactaagttgtttttttttctttcctccctccagagctgggtcctcccgtctcctcccctcccctcttcttttctttttgttgttgtttgagacagggtttcactctctcgcccaggctggagtgcagtggtgcgatctaggctcactgcaacctccacctcccaggctcaagtgattctcctgcctcagcctcctgaatagctgggattataggctcacacaactaccatatggctaatttttatatttttagtaaagacggggtttcatcatgttggccaggctggtctcgaactcctgacctcaaatgatccacccgccttggctgcccaacgtgctgggattacaggcgtgagccaccatggcccagccatggttttttttttttttttttttttgagacggagtctcgctctgttgcctaggctagagtacagtggtgtaatctcagctcactgcaatgtccacctcctgggttcaagcaattctcctgcctcagcctcctgagtagtaggaatacaggcgtgtgccaccacgcccagctaatttttgtatttttagtagagacggggtttcaccatgttggccaggctggtctcgaactcctgacctcaggtgatccagagctgggtattttttaaaacctatatgttttttctgattacaaaaagtattatttacaaagtatacatatagaaatacatggaaagtaccaatcactttacaaacccgctctctatcccaaagttgctgtgttttacatgtatctctcatatactaatacagtactatcactgctgtattttaccattatttggcaaaaatggggtggtatcatgtaggttatttcatcatacctgctactgtccccctatcccccgccttttttgagacacgatcttgctctgtcacccaggctggagtctggtggtgcaatcatagctcactgcagcctctacctcctggactgaagcaatcctcccacctcagcctcctgagtagctgagactataggtgcatgccaccacacccagctaatgtttatatctttcacacagatggggtttcatgttgttgcccaggctggtgttgaactcctgggctcaagcgatctgccatcctcagcctcccaaagtgctgggattacaggagtgagccaccatgcccagcctctacttgccctttttttttttttttttgagacgagtcttgctcttgtcacccaggctggagtgcaatggtgcaatctcggctcaccgcaatctctgcctactgggttcaagctattctcctgcctcagcctcccaagtagctgggattacagggatgcgccaccacactaggctaattttgtatttttagtagagacagggtttctccatgttggtcagggtggtctcgaactcccgacctcaggttatctgcctgcctcggcctcctaaagtgctggaattacagatgtgagccaccgggctcagcctctacttgccctttttaacctgacatcacacttcgccacctatccatgcctgtatgtgtagacacataagggttactgtcctcctcctgaagtggggagtaagctggcttagggaagtttagtggcttctccagagtgttacgcaggagagccttgcatcgcaaatagctccacagcgttagctgaggtagaatcctcaggggagaagcctggcttggagaagacaacctgtttctatttgtgggtttaaagatgttaaatgtaatcgaccaccgtcctgaggaatgattattttgagctcagcgattcagacagcaaagcccctgcccttggagtggtgacattccttccctaggatggaaggggaggataaaagcaaattcataacttgggcatatggtgattggtgctaatccctggcatgttttcagttttgaagtaaattgtggggcaaggagcgctttttcagataatcaccttctggtttgccaggggcagtcagcagaggggtctcaggtttggggctgaggggcagaagggcaaaaggaggagaccttgggttctgaaaactcctgtcttggcgtggtggcactcgcctgtaatcccagctactggaaaggctgaggcaggagaatagcttgaacccagtaggcagagattgcggtgagctgagatcatgccactgcactccagcctgggtgacagagtgagactctgtctcaaaaaaaaaaaaccaaagcaaaaaaacctcttgccttagaggagatgctccattagaaaatgatttctggccccctgtcctggggatgccgccccctaccccttctgtctatttgaagtgaatagccagggactcatcacctccttgggagagaggatgggtgaggtgcattgtaaggatagactgggccttcccaccttccccacagagggctgcaagaactttcaaacctggagacatcaggccctgatcctctctggtttctgctggagctaggaagggatttaacagggtggaggacagggcaggttctttctgtccttgagctgtctttccacaaagtatatttaagtccctccctcttcagtttccttgtaataacagcccagaaggttacaaatgtcttgccacttggcagctgtagacactgaggcttacggaggttggagtgacttggaggttatatggctggatcagctggaatagaaacccaggtttctcttccttactgagggagaaacatgcctgctcgcctgctctgcttcttttttttttcttttttcttttttttttgagacggagtcttgttctgtcacccatgctggagtgcagtggtgcaatcttggctcacttcaacctccgcctctcgggttcaagcgattctcctgcctcagcctcctgagtagctgggattacaggtgcccgccaccacacctggctaattttttgtatttttagtagagatggggtttcgtgttagccaggatggtcttgatctcctgacctcgtgatccgcccgccttggcctcccaaagtgctgggattacaggcgtgagccaccacgcctggcctgctctgcttctttcatgtgcatgttgcaaggttctcattcattcattcattcattcattgactcactcaccaaagatttatggagttactgttgaggcactgtctagggccttggggactcagcagaaacaagatggagaaggtccccagcctcgcagggcttccattctggtgatggagagagagaaataaccaggccattacaacagagggtgagaaatgacgtgctatggagcagcggttgctcagccctgcatgcgatcagaagcaggtataggacttaaaaggaaagccaggcatctaggccccacactgaggtctgggctggggctagagtttgtgaatcttttacaagttctcatatgattctgatgcacacaggttaagaaccactgctgagggaagaagctatgataagaatagctctctttcaggccgggtgcggtggctcatgcctgtaatcccagcactttgggaggccaaggcgggcagatcacaaggtcaggagttcgagaccatcctggctaacacggtaaaaccccgtctctactaaaatacaaaaaaaattagccgggcgtggtggcgggcgcctgtagtcccagctactcgggaggctgaggcaggagaatgctgtaaaacccgggaggcggaccttgcagtgagccgagatcgtgccactgcactccagcctgggagacagagcaagattccgtctcaaaaaataataataataataataatatctctctttcttttttttttttttcccaggcagggtctctcttgtcacccaggctggagtgcagtgctccctctgttgcccaggctggaatgcggtggcgtaatctcggctcactgcaacctccgtcccccaggttcgagtgattctcctgcctcagactcccaagtagctgagattacaggcacctgccaccatgcccggctaaagtttgtatttttagtagagacaggttttcaccatgttggccaggctggtcttgaattcctgacctcaggtgatccacctgccttggcctcccaaagtgctgcgattacatacaggcgtgagtcgccatgcccggccaagaacagctctctttcgtccagcactcattacttaccaggcatcgtgcttagttccttccaccgattcccgacaatggccttatgaactaggtcttatattttttcattttattttattttattcttttgagatggagtctcactctgttgcccaggctagagtgcagtaaaacaatctcggctcactgcaatctccatctcctgggtttaagcaagtctcccacctcagcctcccaagtagctgggaccacaggcgtgcgccaccatgcccagctaattttcgtatttttaatagagatgatgtttcaccatgttggccaggctagtcttgaactcctgatctcagatggtgcgcccaccttggcctcccaaagtgctgggattacaggtgtgagccaccacacctggccttaggtgttatattcctataaatgaggaaactgaggctgaaaaaatgaattagccaagctgaggttcaaacccaggccttactgactctagggcctgagctttaaccatctatacgatgatggctggctctcacagagacaacaggaaaaattcaagtgaaaaactctcctgagagccaggagagacacaagggttaacagtcttgcggagtccttgtttaatgtacttaaacagcagattccttccagaagccacatggctgcttgtaacggttgagaaatccattagccagttattaatgacaagatctaaacccttccaagggagagagccaagaaatgcttttaataccctcttttctgaggtaatggcagcagagcctctctcagccatgggttctgtgcacagaatgatggtgtggtccttcaaaagcccgcagaagtgatttcatccccagactgagactccctagagacaccccaaatcacaccctcatcaaacacaagaaaatcacttctctctcccccttccaccatgacggttctagcctcccccaaggaggcagttctgttgacagtagcacagcccaattcagacccctgtccctgcaggtggcaggtcccctcccctcactgcagcccctagtgatatctgatctcaccagccatctgacaccacaccctgaaacctcagctgttggaaaggtcattcccctattcctggcttggccaagtttctgattgaactgtacaactgtgactgtcactacctctgcctctggcctcaaggagccaatcttctgtcacacagccatcctgggccacttcagccatttggcctgactccagcccatgcctaaggcagttgcgggtcatccctgtcccaggggaggacagcagtgcactggatagaccagttctcccttcttgtctctaaggacacgctgctcctattccccaaagagacagacattgtttcctccaggagctgagaagccctcttctttcttctttgcctaaagaaggcaaatgatatgcttagattcatccattcattcagcattcatttatatctcagacacctgctgagcatgagtccagtgctagctcagtggagaatatgggatgagctgcccctgccctggcagacccagagagaggctgatgctcctggcactgggaggcagagggctcaagagggattgcaggcaggactgtacatcccagctccattcccatcacttgcctctctgtctatgcctccatttcctttttttttttttttttttttttttttttgaggcagagtcttgttctgttgcccaggctggagtgcagtgggtcgatctcggcttactgcaacctctgcctcccaggctcaagcgattctcctgcttcaggcttctgagtagctaggattacaggtgcaccccaccacgcccagctaatttttgtgtttttagtagagaagaggtttcgccatgttggcccagctggtcctgaattcctgaccttaagtgatccgcccaccttggcctcccaagttgttgggattacaggcatgagccaccatgtctaaccatccattttctcttttgtaaagaagcccattactcaggattctggtaattaaaaaatataaggctgggcgcggtggctcacacctgtaatcccagcactttgggaggccgaggtgggcggatcacctgaggtcaggagttcgagaccagcctgactaacatggtgaaaccctgtctctactaaaaatacaaaaattagctgggtgtagtggcgggcgcctgtaatcccagctactcaggaggctgagacaggagaatcacttgaacccgggaggcagaggttgccccaagctgagatcccaccattgcactccagcctgggtgacagagcaagactccgtttgaaaaaacaaacaaacaaatagatctaattcttttgaaaacattaaaattgattgggcgcagtggcgcatgcctgtaatcccagcactttgggagaccaaggtgggtttagcccaggagtttgagactagcctgggcaacatgatgaaaccctgtctctacaaaaaaatacaaaaaatgaattagccaggcgtggtggcacgtgcctgtaatcccagctacttgggaggctgaggcaggagaatcgcttgaacccaggaggcggaggttgcagtgagccgagaccgcgccatggcactccagcctggcaacagagcgagactccgtctcaaaaaaaaaaaaaaaaaagtacaaaaaatgagccgagcacggtggttcatgcctgtaatcccagcactttgggaggccaaggcgggcagatacctgaggtcaggaattcaagaccagcctggtcaacatagcgaaaccctgtctctactaaaaatacaaaattagccaagtgtggtggcacatgcctgtaatcccacctacttgggaggctgaggcaggagaaccgcttgaatccagaggtggaagttgcagtgagtggagatcacgccattgtgctccagcctgggcaacaggagtgaaactccatctcggaaaaaaaaaaaaaaaaatggccgggcacagttgctcactcctttaatcttagcactttgggaggctgaggcaggtggatcatctgaggccaggagttccgagaccagcctgaccaacatggtgaaacccccatctctactacaaatacaaaaattagctgggtgtggtggctcacgcctgtagttcagctactcagaaggctgaggcagaactacttgaacccaggaggtggaggttgcagtgagccaagatcgcaccattgcactccaccctgggcaacagagtgagaccctgtctcaaaaaaaaaaaaaaaattaaaaataggtaaattgccattttcaaagatacctgtaaagatttttaaaatcattcatgaatgcggtctgttcgttgcacagagtagatgctcaaaaatggtgaatgagaccctctattttggtctcatgctgaagaagtccataaagcccacaagtcattttcatgatggacagaaaaatgtgtgtgctttctctgtctactgcctcaactgcacagaccccgggactgtagcagaaccatcttttgagcttgacaccgggaggcccaaattctagcacgggacccagggccagttgctctctggtcctcagtctcctcacccataaaatgggaaggagagaaccctgaatcattgcttctagcttctgaactcagttgttcagaacaaggactcactgctgatttttcaacagcacagggaattgcactgttcctgggaatgatggacagtaccctctgttccactgggcaagtgagatttcccaggcctctctgttcccttctccccttagagagcaacagacgtggccccatcccacctccctcaaccctctctctcctccctcaggactgggcacctcgctgcccccgctgctgcccactctgcgactgtgcctgtacgtgccagctccccgactgccagagcctcaactgtctctgcttcgagatcaagctccgatgaggacccagggcccctgccctctggggagcggccagcccccagggcccatgtgccctcctccctgaagagcctttccccacgccactggaaccacagatggcctgccgagcacccaggcctgggaactggaagtggcagcgcagggcctggctccctgcagggcaggactcttggccggctggacggcagctcctctggagggccagaaaagagaggggctagtgctcgggcaggtgccctggcttcccttcccctccacacgtcaacgattctatttgaagttgggcaggggggtggcgctgctcaccacacacaagtgttataggaggagtctggcccttgagtaccgggtacgcaggggtgcctcaaccacactccgtccacggactctccgttattttaggaggtgagtgtagtgccagtatctactctccttcttaaaaaaaaccagggctccagagaatcagaacagccaccatcaccgcagggagtcaagggaggagggagattagagaaggagccagggagggtggcagggaggccacgtgatccgagtcccctcacccctttccttcccacaggtccctggccaaagatttatttctcttgacaaccaagggcctccgtctggatttccaaggaagaatttcctctgaagcaccggtgagtgggcaggggctccctccccatcaatagggccgacccaagtcttcctcccccttcccccatgccgggccccacgatagtgtgaatgtcaggggcttcaggtttccctaaatataggtccctgccagaggatccgtggcgggaaaagggcaggggtcattagagaagatcggggacacatgtggggcgggcaggagctgccttataaccagcccgggaacccctagctcactcgctgctgaccaggctctgccggctccttcggcctcgccgcaggtgggccccttgcaggaccgggccggggtggggatggggttggggttgggccaacagggtccagatggggtccaggtgaggaggggagatttggacgataggagcagggggctcagcatctgggaggcagatcagttcggggacggattttcttttggagaaggaagtcaggctcaaggaagacgtttggcaggaactgtgaccccgcatgccagaggccgagcagcggccggtgcatagccgcgcattctggttttctgtggcgcagaggactaccagcctggctgcggcggcccggcggagagcgcgcacgcatgcgcgacccagcccggcctgccagcctggaactcggatggggaggtctcgcctccgcgcgccgctagttccgccgccttctcgcgctccctgcgtgtcctctcgatgccctttcctccgcctcccttacgcctgggccagtgacagggtgtcggctccgcgccgattcagcccgcgggcgaggcaggctaacgcacgactgcgcgatgtggcccctatggtgacacgcgctgcagccgcgaagaccggaagctggggcggccccgggccgcgcgcgctgggcctgggaggcgaaactcagcttccttcgtttccgacttttccatccgcgtcctccacttccccgttccgccctcccccattgccaacattctggctgagtcacggcgccccagagcgcgccaggctgggggaaaggagcagaagggagggccctagcgacccgcgggatgtggtccgagtcacgtccgaggggggtggggagggatcgtgttctcggcgcccgccccttcctagcgcggcctctgggctgcgcctctcgggggcggcccgtagcccagtccgtcgcctgccattggacgccgcccgctcctcgtaaaggaaaaagctcggcggagggcggagtggtgcctttaaaaggccgggcgccgccttccgcctgcccgcctcctgcgccgccccttccgaggctaaatcggctgcgttcctctcggaacgcgccgcagaaggggtcctggtgacgagtcccgcgttctctccttgaatccactcgccagcccgccgccctctgccgccgcaccctgcacacccgcccctctcctgtgccaggtgagcgcccctcttcacgtgcggggaccagggaccgtggagagggatcttgggggcagtggcgggttgggcgtccgcgtggaggcctcccccatcccatgccagcgtctccccactaccaggcacacacaggctccccggcccctccagcctgaggtcctctaactgcgcaatgcagcggctgcgcgcgctgagtcatggcgggggaggaagccggacgagatgaaggaccattctcccccttttcttgcagggacccctgtggcaaaggattagggccccttagccctggcggggatcctaagaggcagtgaggggtgggggccggcccatgtacagccccagggttctcgcaagtgggagcttggtttctgtcctgggaaacggggcgcccttcgcgaggagggaaacccctccgcggtgcttgatgcccccttaacactttccctgtctctccttatcgggcgaccttgattctgagcccggaacagctgcagccatgcgaagcgacgggagcatttttcaggggaaggcgcttgctcctccacgttcttgccccgtaggaacagtgacgatggcaaagcttaccgctttcctcgcctcgggctagggcttgttccgccgccctttcctgggcttctccttgctctcttatatttttcctaatgcccctttcctaccacccgccccctcccttgtggggaaaagcctgaccttgggatgtccttgaagccttggagcccgggccagccctgggatcttgaggggattggaaggaacaccccagtggcagtcagaagagctgggttctaatctcagatctggctccggggttgctgtgtggcttgaagcacagacctttcccatatctgggccctttcccacgagggtgttgggccctctgcttgattcacgatctttacattctaaaatactccggttcggttttgttttcaggcaaggtgaccccatggcaaggcgcaagccagaagggtccagcttcaacatgacccacctgtccatggctatggccttttcctttcccccagttgccagtgggcaactccaccctcagctgggcaacacccagcaccagacagagttaggaaaggtacaggggcaggcctagcaaagggaagttgggcgtaagagagagctggggaccagaagtgccccagggcctgctgggtgtggggcaggggaggtagggaacatttccctgacctccaggagaggggccctggtcatcgggagatgatgggaaaccctagctaactagtccttcccctctgtttcctgtatccaggaacttgctactaccagcaccatgccctaccaatatccagcactgaccccggagcagaagaaggagctgtctgacatcgctcaccgcatcgtggcacctggcaagggcatcctggctgcagatgagtccactggtgcgggcaggagacagaatgggtggagggtgcagggttgggagtggcaggctgatcccctaattcccatgtgacactcccagggagcattgccaagcggctgcagtccattggcaccgagaacaccgaggagaaccggcgcttctaccgccagctgctgctgacagctgacgaccgcgtgaacccctgcattgggggtgtcatcctcttccatgagacactctaccagaaggcggatgatgggcgtcccttcccccaagttatcaaatccaagggcggtgttgtgggcatcaaggtaaggggagggcctccggacgtgaggtttgagatggaagtggaggaaggaaatccaggttagtgaggcagggaatgaatgctggattggtggcctagagacttgcatggagcctgcttcaggcttagggcatttactcgacatttttaatcctcacaattctgagagaacagtatcattcccactttacacatgaaaatctcagaagctcagggaagtgaagtgttttgctcagagtaagtggcagagccccagtctgacacccaattcactcaacatttctgttgtcaaataacatcccagtgtatcctgtctcagaggattgttactaagtgaactaagtgaaaatattttaatttaattgtaactaagtatttgagtaactaaacattttaagtaaattttttttttttttttttttgagatggagtctcgctgtctcccaggctggagtgcagtggtgcgatctcttggctcactgcaagttccgcctcccaggttcacgccattctcctgcctcagcctcccgagtagctgggactacaggcgcccgccaccacccggctaattttttttgtatttttagtagacactgggtttcaccatgttagccaggatggtctcgatctcctgatctcgtgatctgcccacctcggcctcccaaagtgctgggattacaggcgtgagccaccatgcccggcttaagtaactaaatattttaattgtaactaagtgaaaatatttgccagccctgagatgcagtttaagggattaagtaaatgtgggggaagactggggctaaagaagaggaaagaggggcacgcccagctacctaggaggctgaggcgggaggatcacttgagtccaggaagtggaggcttcagtgagctgagattccaccactgtactccagccggggcgacagtggaaagggtgctagaggtcatttcctgtgtcttaatgttgttaccctgaccccaacaggtagacaagggcgtggtccccctggcagggacaaatggcgagactaccacccaaggtgagaactgtttgattctctgccctacgaacccaaccagagcaggtttgggtgctgggaggagtggaaaccacatgcccctccccaccgtgctctgaccccttcctcttctcttagggttggatgggctgtctgagcgctgtgcccagtacaagaaggacggagctgacttcgccaagtggcgttgtgtgctgaagattggggaacacaccccctcagccctcgccatcatggaaaatgccaatgttctggcccgttatgccagtatctgccagcaggtgggcctgcaggtcctcaataggcaacctcctacctcatttggttccagtgttgttaatttgcctattacctgccatgatgcctacctccccaaaagcaagcattagctttggcccgtggaggacactcaagggctgttgaaggcagaggggccaaggagggatggtgggtggatctgaggcggctcttgtctcctgtaatctgagggctttgaagcctgagtccctggcatcatcaagatacggtcttgaccagtggctgtggagagatgtaggtgggactctgggttaggaggcctcacagtgaccctgtccctcgccctgcagaatggcattgtgcccatcgtggagcctgagatcctccctgatggggaccatgacttgaagcgctgccagtatgtgaccgagaaggtaaatggctacctgcctgaccagtgcaaggtggctggccggggaccctggggctaacccctatcctctcctccaccccactacccaccgtgcgcctgctctgctccaggtgctggctgctgtctacaaggctctgagtgaccaccacatctacctggaaggcaccttgctgaagcccaacatggtcaccccaggccatgcttgcactcagaagttttctcatgaggagattgccatggcgaccgtcacagcgctgcgccgcacagtgccccccgctgtcactggtgaggcccacactcatcttgatctctatgcagtagataagctccacccacaaccctatgcccatttggacggatttccatggcaacttccaccagctcctgccagcttcctgggtctctgaccacagcccctctcgcctcacccctgctctacagggatcaccttcctgtctggaggccagagtgaggaggaggcgtccatcaacctcaatgccattaacaagtgccccctgctgaagccctgggccctgaccttctcctacggccgagccctgcaggcctctgccctgaaggcctggggcgggaagaaggagaacctgaaggctgcgcaggaggagtatgtcaagcgagccctggtaaggataggcaggaggtgggcagggtgcctgggtggatgggactcggagaagagcccttctcactccacccctctccctgcttaggccaacagccttgcctgtcaaggaaagtacactccgagcggtcaggctggggctgctgccagcgagtccctcttcgtctctaaccacgcctattaagcggaggtgttcccaggctgcccccaacactccaggccctgccccctcccactcttgaagaggaggccgcctcctcggggctccaggctggcttgcccgcgctctttcttccctcgtgacagtggtgtgtggtgtcgtctgtgaatgctaagtccatcaccctttccggcacactgccaaataaacagctatttaagggggagtcggccgtccgtgtcttgtggtgtctaatgcaggggagggcctggggaggtagcagagcccagaagaagaaagagcccctgttctctgttttttctgggcagaaaaggagtgaaaggtggaaggaccttcctgctctgttttatacttggccagggcttcaagaaaggctgagagcttgtgacattttcttccagccactgcaggctctgccccttcacctaacagcataagatagggctaacagttggggagtatggttgtaactgctcatgtcttaggaggcttcagcctcagcacttttaggtccagaactcaaggggggcagaagacccctgtgacaaaaacccactaactagctcatgagtgacatgagccaggcaacataatgggtgttttatatgagtagatgctgttatttttaatttatacctaaggctcttttgcccaagattgaactgtttcttggtggaaaggattatcaatgcatatctcttttttttttttttttgagacaatctcactctgtcacccagactggagtacagtggcacgatcttggctcactgcaacctctgcctcctgggctcaagcgattgtcctgcctcagcctcccaagtagctgggattacaggctcacgccactatcgcctggctaatctttgtgttttttagtagaggtggagtttcatcacattggccaggctagtctccaactcctgacctcacatggttcctccacctcagcctcccatagtgctgagatgataggcgtgagccactgcgcccagccaatgcttatctccttaatctacactattgagttttctgttttcccatctttttttttttttctttttgagacagtttcgctcttgttgcccaggatggagtgcaatggcacggtctctgctcactgcaacctccccctcccgggttcaagtgattctcctgcctcagcctccacagtagctgggattacaggcgcaagccaccacacccggctaattttttatttttagtagagacgaggtttcgccatgttggccaggctggtctcgaactcctgacctcaggtaatccgcctgcctcagcctcccaaagtgctgggatgataggcgtgactgcgcctggcctgttttcccattttaacaggagatggaattagagagggcttcttagtctcctttgggctgtggaatcccataaaaaccttgaattgtttccaatacccccttggtaatgcagatacagaagttaagctgtagagctcaggctccaggtgaagaactgtgtctctgtagctgctgctttccatgaagctagaatgagcgtgccatgccattactttgagcctttccccaatgacccaggctggggtgtacagtaactacatcagctctctggacctagagaatctctgcagtgattcaggtagaacggagttacctagaaccttctaggagtataaaaacttggtcctaggccgggtgcggtggctgacgcctataatcccatcattttgggagaccaaggtgggcggatcatgaggtcaggagtttgagaccagcctggacaacatagtgaaaccttgtgtctactaaaaatacaaaaattagccgggcatagtggcgcacacctgtagtttcaactacttgggaggcggaggcaggagaattgcttgaacccaggaggcagaggtaatggtgagccgagattgtgccactgcactccagcctaggcaacagagccagactccgtcccaaaaaataaaaataaaacttggtccttcccttttctgcttattttgcttttattgcttacatctaaaacaaaaccaatcactattatccctctaaactttggattaatttgtctgcctagctcattcaactctgggaaacaaacactgaagtaaagcaaataaaaattgaaggtcggtagaagatggcaaagggggcattccaaaagggaacatgtgcagagtctcagagactggagagattgtttaaagatcaatagtttcagccgggcacggtggctcacaactgtaatcctagcactttgggaggctaagtccggcggatcacgaggtcaggagttcaagaccagcctagccaatgtggtgaaacccccgtctccactaataatacaaaaattagctgggcatggtggcgcgcgcctgtagtcccagctactcgggagactgaggcaagaagagtcgcttgaatctaggaggtggaggttgcgctgagccaagattgtgccaccacactccatcctgggcaacagagcgagactccgtctcaaaaaaaaaaaaataaaaaagactagagaagcagagaacgtcatataccagtttgggggatttggacttttatttatttatttattttgagacgaagtctcgctctgtagcccaggccggagggcagtggcacgatctgggctcactgcaacctctgcctcccgggttcaaaccgattatcctgcctcagcctctccagagtagctgggattacaggtgcacgctactgcacccggctaattttttgtatttttagtagagacggggtttcaccatgttggccaggctggtcttgaacccccaatctcaggtaatccgcctgccttggcctcccaaagtgctaagattacaggcgtgagccaccatgcctggcctggacctcttaattttatgataatctgagttcccgaaagagtaattgatagaaaaaaaaactacacctgaggacacaactttctgagttcaaatttctttttttttgagacagcatttcactctgttgtccaagctggagtgcggtgtcacaatttcggctcactgcaacccccgcctcctgggttcaagcgattctcctgcctcagcctcccaggtagctgggactacaagcgcatcaccaaacctaattattattattttttattttttaggatagacagggtttcaccatgttggtcaggctgatcttgaattcctgacctcaggtgatccacctgcctcggctgcccaaagtgctgggattacaggtgtgagccaccacacacagccaggttcaaatttctttcttttttttttttgagacagagtctcgctctgttgcccaggctggagtccagtgacgcaatcttggctcgctgcacgctctgcctcctgggttcacgccattctcctgcctcagcctcccaagtagctgggactacaggcgcccgccaccacgcccagctatttttttgtatttttagtagagacggggtttcactatgttagccaggatggtctcgatctcctgatctcgtgatccgcccgcctcagcctcccaaagtgctgggattacaggcgtcagccaccgcgcccagcccaagtttcttattctttttgtttatagactgggtctcactctgttgcccagcctggtcttgaactcctgggcttaagtgattcgcctcggcctcccaaagtgctgggattacatgcttgagccaccacacctagccccggattcaaatttcagtgtaacatccccaatccactgttatacaagcaatgaacaagttatttaacccctctgagccagtttcctcctcttaaaaaaggcacaaaacttaatagaaagcaactaagaagccaggcacggtggctcaagctggtaatcccagcactttccgaggccgaggagagtggatcacctgaggtcaggagttcgagaccagcctgaccaaaatggtgaaaccccgtctctattaaaaatgcaaaaattagctgggcgtggtgacgggtgcttgtaatcccagctactcaggtggctgaggcaggagaattgcttgaacccaggaggcggaggttgcggtttgccaaaatcgctccactgcactcccgcctgggcgacaagagcaaggaaggctctgtcttaaaaaaataaataaatgaaaatacaaaaattagccaggcgtcgtggcacatgcctgtaatcccagctacttgggaggctgaggcaggagaatcgcttgaacctgggaggcggaggttgcagtgagccgagattgtgccactgcactccagtcggggtgaaaaagcaagactccgtctcaaaaaaaaaaaaaaaaaaaaaaaaagaggccgggcacggtggtacacgcctgtggtacagcactttgggaggctgaggcaggtggatcatgaggtcaggagatcgagaccatcctggctaacacggtgaaaccccgtctccactaaaaaatacaaaaaaattagccgggcctggtggcgggcgcctgtagtcccagctattcaggaggcagaggcaagagaatggcgtgaacccgggaggcggagcttgcagtgagccgagatggcgccactggactgcagcctgggcgacagagcgagagagtgagactctgtctcaaaaagaaaaacggaagcaactaagaaatgtcaagagtgccattttggaatcagagaagtcatgctgactgaggcacaggcttggcgtgggaaaagtggactccaatctgttaacttctgaagttgtccacggcaaatatttctctgacggcacaggaagagatctgaacttggcttccctcatccattgaacaagtattaacaagtatctatatatgcctaccgtgccaggccttattctaaccactggggctgcaatatttaaaaagacaaagttggatcctccaaggactgtggtggggaaggctgacaaaacaagtaacaaaaatgtgtaacattaaaaaaaaagtgtaatgttaaaaaaaaaaagtgtaataaagttacaaagcctagccccagctcggcttgtttccctagctgaaatgggggatggccgggcgcggtggctcacgcctgtaatcccagcactttgggaggcccgaggcgggaagatagcttgtgcccaggagttcgaggtcacagtgacctatgatagccccaccgactccagcctgagcgatagagcgagaccctgtctctaatttagaaaaaagaaagttgtggccgggcgcggtggctcacgcctgtaatcccagcactttgggaggccgaagggtggtggtgggtgggggcgcggatcacctgaggtagggagttagagaccagcctgaccaacatggagaaaccccgtctctattaaaaatacaaaattagcccagcgtggtagcgcatgcctgtaatcccagctactcaggaggctgaggcaggagaattgctggaacccgggaggcggaagttgcggtgagccgagttcgtgccattgcaccccggcctgggcaacagcaaaactccgtctcaaaaaaagaaaagacagttgtttaaacatttttatgaaatgatatgggaggggactggtctagggtttctaatagcctccacatcgcccagcggcagagcccacaaaactgccactggccgccaccgggttcctccacctccttcccgatctcaggctggagaagtggtgcaggggtcgctgcgaaaggagaggagcgtgtatgacgccacatccggcgcgcggcggaactggcctcctttgcttccgcggcggggccggaagtaggagcggcggcggcggcggcggcggcggtcgaaagcggagtgaaagagggaggcagggagccggagagccggaaccggagtcgcagcggcggtaatagtgcgagactcctctaagtcaccgtccttagcgcgggaccgcggggttcgacgggagttagcgggggtgcggccaggccgttggacgccggggggtcctggggccgatgtgaggggaggcgggggtgggggagccgggccggctctagaatcgagttgtccgctccgagccccggacggacactgatccgcgggctcgtcttggcctttcccaggagacccctgtgcggtgcggagggggcggcggccccgactctgacccgcgccgggggtgggccatggcggagatcagcgacctggaccggcagatcgagcagctgcgtcgctgcgagctcatcaaggagagcgaagtcaaggccctgtgcgctaaggccaggtgagctcgttggccctggggaagggaggccaagccgccgcccacgggttctggcctggggcaaacccaactgagaactttgggcttgcctcgttctggaagctttcccagagaggagcaggatggagccgctgccctcgaggaaaagctagcctgctcggggaagacagagtggataaagacacttaaagtttattagacgatgtgtttccagtggagtaagagtgttacataaagtacttaggaaactcaaggaaacaagtccatctgtcgggggacggaagcttgttggaggggggccgaactgtgggagaggcctcgaataaggaggtggtaaaagagtcagccaaaaaccaaaagtttaagacaggaaagttaaagaccctgtgatttataaaagtcttctaattacaacaacccttaaagattggtggtattgtactcattttacaggtgggaactttcatgttcaaagttacccacaagtaaggaatggggtctgaagccagctcttagtgtcctgtcctttttcaggccataatgcaaaaaggtggagttggatcattcacgttcagggtgggagcctgagaaatcgtagcaagtaagccagggtagaattaagcacgatagggaggccagttcagagttctgtgggaagtaggatgatgtagtggttaaggctctaggttttgcagtgtgagatggctctaggtttgaatctgaactctgccgctttctagctgtgttagtaatcttaagtgtctttatttgtaaagcagaattaatagtacttaataagatgattgtgaagattcagtgagttggtgctggagatgaggttagcacagtgttttggtacagcatacgtgcttgataatcaccaggtattctatttcttttggaagagggcaataatgagatgggctaaagccatcagggagggcttttgagtggaggtaggccttgaaggatgaagataatttggctagctgatggaggcagggccagtgagggaagggcattccaagcaggacgaatgtaacagtggaggccctgagatgcgtggggaacagtcaggggtttaattacctgcctcctctggggaactgtgtgattgtggcttctaccaggctggagaattgtggcagaagagcccacagaattaccctacgtttattgaacagtaaacattggcctttacagggccactatttggcctggcccggtactggcaaaaaacttctatccatctcttccccccagcaatcctatgaggttggaatcatttgctgcattttatcgaataggaagccatgactcgtagaggtctggtgacttaactgaggtcacccactgaggacgtggcagagctgggtcctgaatctgtggccctcaggctctttgcctggccctgcctcacatagactacctgcagccagacagggcctgtgaggggatgatgagcagggtcggcctctttttcgccacctgtctgtggcttttctcttttgccagctgaccagaccagccccatggtgtttttagttgtcccctttccctcagtcctgattggcatttttaggaacttaaacctgttgttgcctggcactattctttaacctcgaagtattgtctccctcacgggccctggatcagtgtggtggtgatggtagacaaagcttagatagcatgctggagtttgcagaatagcaggaagtcgtatattcagtctccatggctccttgcaacagcctaaggaatacgcagggtgggctgagtacttagccccatttcatagcagaggaaactgagcctttgagtagataatgtcttgcccaacatcacgcagctagtcggaggggaagttagttttgcatccaggtctttgactgtgctccgtggtcactgagagccaggcagaggcatttagattttgatgtggggtgtgaggcagcaggaagccatggaaggctgaggggtggagggtcctgcccagttgaaactgagtggaactaggaggtactaggccaaggcctgagttggccgctgttgtcccaggctcagtctgaagcagggccatctctgatacctggttatggcctcctggggacccatcagagacccaggctgaggctggtggtgtcaagagcaccagcttgcctagagggcacagacatgcagatgaaaccagtggaagcacagaggtccgcagtgtctgagctgaaattgctgctactagaaatattagcacagtaggagagctgagcttttgaatcaggtggtcttcagtatgaatctttgccttgtcacctagaagcaatatgaccctcgtcaagtcactttctgattttttgaagtgataatgacatgcagttgagagtccgggtatccgggcacagggcctgctgcgctggtagccgttactgcaggcaggtcctgatagggctggggaagtgctgcaagtggcagaactggggctggaatctgggcctgattcccaggccacactggggttgcgctggcactgaggggggctttgcagagagcacgggccctgcatgtgacctccctgggcttcaggttttcactcagggtctgtggaaggggctggcataaattctcaggaaattgggcttctgggttccaatttagccactctccagcttggtgaccttgaccctcccgcttttctgtaagctttggtttctttttttctttttttttttttttgagacagagttttgctgttgttgcccaggctggagtgccagtggcctgatcttggctcactgcaacctccacctcctaggttcaagtgattctcctacctcagcctcccaagtagctgggattacaggcacgcgccaccatgcccagctaatttttgtatatttactagagacggggtttcaccatgttggccaggatggtctcaatctcttgacctcatgatctgcctgccttggcttcccaaagtgctgggattacaggcatgagccaccgcgcccggcctagcttcggtttctttactgttacgtgaggctgaagagaacctccccagtctgttggaaaggtcactatgagcagttgatggggaaggatgttcagcacaagaagcagtgcaggtgggagagtccgggtactgatgtggcctcttggaccaccgccagtgctgccttctgttcccagaaagccagggcagacctccttcgtgctgcctctgccatacagagcaaggggcataagtgaatcctcctgtccactgagctcaggaaactcattctaagggaagagattggcagaaagaggggggccaggcgagttgggcctcccacatcagaatatcttgataaagagtcagaccccagagccaggcttccctggttcatatcccacctgtgtcactggcaccaagccagcctccttccctgcttcaatttcttcatctgtgtaccgggaatcatcatagtacctgcctgccaagctcttaataacatttgtggcacacagtatgagctcgaatgttcactgctgctattaccaggcaaaatttggaaatacagtgttgcttaaattgggtatctataggctgggtgcagtggctcacatctgtaatcccagcactttgggaggcaaaggtgggtagatcacttgaggtcaggagttcgagaccagcctgggcaacatagtgaaatctcgactctactaaaaatacaaaaattagctgggcgtggtggtacatgcttctaatcccagctactcgggaggttgaggcaggagaatcacttgacccaggaagcagaggtttgcagtgagcaaagatggcgccactgcactccagactgggcaatggagccagactctgtctcaaaaaaaaaaaaaaaaaaaaaaaattgggtgtcttacctggcaaagtgatttcatctcctgctcactcaagtagaagtagactgcactgcaaggagaaataaaaaatatttaagtcctcatagtcataaagaaatactgaacacatggcaagagcacctcacttttttttttttttttttgagatgaagtcttgctctgtcgcccaggctggagtgcagtggcgcgatcttagctcactgcagcccccacctcccaggttcaagcgattctcctgcctcagcctcccaagtagctgggattacaggcacgcgccaccacgcctggctaatttttgtatatttagtagagacagggtttcaccatgttagtcaggctggtctcaaactcctgacctcgtgatctgcccaccctggcatcccaaagtgctgggattacaggcatgagccaccgcacctggccaagagcgcatcactttgaaggcgcatccactgtgggcctgccctgggcacctacccttgtgtctggatagcctgggagaagggctctgtgattggccaagggtgacttaagctctgctgtggagaggatggggagacccgcctcccaggagtgagtcctggatgcggaagagggagcggcagggggagtcagggctggaaaagtcccagcctgctcagaaggcctggaacgctgggataagaggttggactttgtccttttggcagcagggggccacggaagggtgttgcatgctgaagggccgtggtcagcctgttttggggagactgtacgcttcactcctgccccctggagcttccaggactgcctcatatcctcccctccccccaaaaaaggtcaggaattgggctgggctggcctggctgtggtgaccctggtcttctcctgtctccagagagatcttggtagaggagagcaacgtgcagagggtggactcgccagtcacagtgagtacctgctgtccctgcagagccaggcctggtctttcaggcacatgaagtttcctcttcatcttgggggctctataagcccaaccctaagctcttttatctgtcctttccctcaccttcaacggagcactgctaaaagaagtgggggttgctgtgcacgttggctcacacctgtgatcccagcattttgggagggcaaggtgggcacatcacttgaggttaggagttcgagaccagcctggccaacatggtgaaaccgtttctactaaaaatacaaaaattagccacgcgtggtggcacgtgcctgtaatcccagctacttgggaggctgaggcaggagaatcgcttgaaccccagagttggagattgcagtgagctgagatcaggccactgcactccagcctgggtgacagagggagactccgtctcaaaaaaaaacaaaaaaaaacaaaaaaaacaggccgggcgcggcggctcacgcctgtaatcccagcactttgggaggccgaggcaggtggatcatgaggtcaggagatcgagaccatcctggctaacatggtgaaaccccatctctactaaaaatacaaaaaaattagccaggtgtggtggtggacacctgtagtcccagctactcgggaggctgaggcaggagaatgacgtgaacccaggaggcggagcttgcagtgagccgagatcgcgccaccgcactccaggctaggcgacagagtgagactccgtctaaaaaaaaaaaaaagaaaggaaagaaaagaaaggggttatgggaagggactttggatttgttagtggagattcttggccagggcagaaggactcctatttggcgagtgattctgctcacatatctccagggctctgtgttagtaacttgattctgggtactttgtggggagtagagagaggaaggggccgggacatctacctggaaggacttagttctagctcttgcctacagaatagttggtactcagcataggacagtgggtatggttccagaccagactgacttggggtgggagaggagaattttggtcctaggaagtagaagtgcagccaagagtgataaagctcactaaagcagcgggtgtttggagggtagtccctggcaactcccactgcttgagttccaaccccactcttcctgttccccaggtgtgcggcgacatccatggacaattctatgacctcaaagagctgttcagagtaagagtgtggccaacactgtgaaatgtaacggggggatgactggaagacccctgtaattgagggtgggagccttaatttggggcgtggagtgggggcaaggggccccaagttagatgggtggttgtggaagaagggcctccgctggacagaaacaggtagggggtaggggactgtttacgacagggcaaaactttctacttccccacaggtaggtggcgacgtccctgagaccaactacctcttcatgggggactttgtggaccgtggcttctatagcgtcgaaacgttcctcctgctgctggcacttaaggtggcagtccccggcttctgcacccccaacctgggcgacctcgggccgggcctgtcttagtccgttccgccctcatctcctatcgtgaccagccccaccttggagctgtgtcactggtgatggaccgattctgcttttgggggtggtcagagacttgatgggggttgaggccagcggggcagcattctgggaggggcagaggctcactgttgcgaatgtggcaggtcattgatgccactggtgggagaggcagtgtggggccagatgacaaagggcctgggtgccttgctagggacccggtctgtgtctggtaggtgaaagaagagccattaggttcatagttgagggaatgggtcagctttacattctctggaggggtcgtgtgggcctgggaggtggctgatgccacacgattcaggcaagaggtgccaggagtgtgctgggcagtggttgtgaggatggcaggctggcgggcacgaggaggtcagagagggatgtgtggagagaccgtctaggcgccagccctggcttggtggccacccccaggttcgctatcctgatcgcatcacactgatccggggcaaccatgagagtcgccagatcacgcaggtctatggcttctacgatgagtgcctgcgcaagtacggctcggtgactgtgtggcgctactgcactgagatctttgactacctcagcctgtcagccatcatcgatggcaaggtaagccagcccagggctccatgggacagggagaggaggggggcttcaggcctcagccccgtcctctttccctgctctcccctgtagatcttctgcgtgcacgggggcctctccccctccatccagaccctggatcagattcggacaatcgaccgaaagcaagaggtgcctcatgatgggcccatgtgtgacctcctctggtctgacccagaaggtgagggcatgtgggcaggggcaggcagggacagccaggaggggttgggaaagagagggagcagggctggtcttcactgtcactcgtcctccacctgccaaatggctggaaccctggaggaggagcagggaggcctgcatggcaggtgctttgagcacacagtggcttggggcatggcccagagggctgtggaggacaaccaagtcatggctccctgaagtgaaggggccttagaacatgacagcagcttcttcagaggtcagaaccccagaatggtagccccctgagacccctcattttgtgggttttccactagtgtagagcagagctgagatttaaagtcaggtcttctgaggaccagccagagttcctgttgtcacaggcacacacgcacaggcagcctctgctccagcgcagacacacacacacatacacatagcctctgctccatcacagccacacacacgcacacgaggcctctgctccatcacagccacacacatacagacacacacatgcagacacacacatgcagccgctgctccacagtcactccggacctccctgtgacaacacagggtgcccttctgtctctgggagtgcccctttcactcttatgtgctgtttggacggggattgtatgatcactgtgattatgagggggccccaggcattgggcgttctttctcctctggagcttatctgcccctacatttgctgtcctggtccccgccatcccacagaccatattcaggccccatgctctggtcccacgggcctctggtggacttggggaggggccaggctgctcaccctcaaggggcagcgctggcagccagagaagcctgaggacatccctctccatccctccctttccgcatcagacaccacaggctggggcgtgagcccccgaggagccggctacctatttggcagtgacgtggtggcccagttcaacgcagccaatgacattgacatgatctgccgtgcccaccaactggtgatggaaggttacaagtggcacttcaatgagacggtgctcactgtgtggtcggcacccaactactgctaccggtgagccggctgggccgggctgggatgggcgggcatctgagccgagctgctcctgaccctgctgccccgccttccagctgtgggaatgtggcagccatcttggagctggacgagcatctccagaaagatttcatcatctttgaggctgctccccaagagacacggggcatcccctccaagaagcccgtggccgactacttcctgtgaccccgcccggcccctgccccctccaacccttctggccctcgcaccactgtgactctgccatcttcctcagacggaggctgggcgtggggggggctgtcctggctctgctgtcccccaagagggtgcttcgagggtgaggacttctctggagaggcctggagacctagctccatgttcctcctcctctctccccacttgaaccatgaagtttccaataatttttttttctttttttccttcttttttctgtttgtttttagataaaaattttgagaaaaaaaatgaaaaaattctaataaaagaagaaaaatggtttttgggtttgtgccagacttggttgggaatgcacagggttgctggcctgggacctggggtggacgtcagggccttgactgcctcagggccccgacctgccaagagggccaggctcaggccagtcagcttgcccagggcctccaggggccgctgcctgctggcttccccagccctagggagagggctctgttctcatgggcagccttatcttattaacagcatacacacacaggcacacacagaatcacaggattctgatttctccattttcctgaagaggagatgggcctagagggccagtggattttgtgctaggtcaggcagctggaaacacaggtctagatctgggcctgggtctcctagcaaagcctttgctcacccagccccgcccagggccaaacacaggagcccaatgtttcctgagcatggatggcttttgagttttattaacaaaaatactctggtcccagaacaacagactggtgtggcctgcaccagtgtgtgtgggggggtggggattgagcccctccagagcccatggggaggcctggtaagtggggatgctggtctgtggccccatttggccaggcagagccccttccattcacacggaggtgagagccgggaaggggaagccggccccagctggactcccagcagccttggttaggctttgaagccagaggggggtgggagtgaaatcaaggtgtgaagttgagggggtgggtgggcaggcccaaggcggccatttggtgtgggggatggggccggtggaggtgagggggctccagggctgggggaagggagcgggaggtttgtgatggaggcagaggggcccagcagtggttcagtacatgggtttggagcccacatccagatagcccccaggcgcggtgtatggtagagggaaggggcccccttggagaaagtgcggggcaaagggtaccgccggtggagccgctgggtacccggagccccctgacccgtgcggcagctccagaaatgcagccgagtagggggctgagcgcccggagtctggagcctccgggaagctggggctcctgacatggagagagggatgtcagagcagggcagagggacccgcagccccgcctggtcccctgtcccactcacctggtgggaaggtgactgggggccccatggaaagccgcagggtgcaggaggtaggcctcagcactggggccaccacacagaggtgccggggcagcggtggcttccccgggggctggggcctgttctggatctgattcacgaatgtctccacccagggtggagtcgcagggaccacctggtgtgtctggggagagggaagggagaggttgggctagggaggatccctgtctcaggcctggccccatcgccatcgggactacactcacctccgctcccataggcctctgtggctgctggctctgggccccgcagtttcctcttcacacgggcgtctcgctccctggggaacagtggtggtgatgatgatgatgatggtgatggccatggtgatggtaacagtacttacccggtgccaggcatttcaccctcccagggaccctgtcaggtaggggccatcattatacccattttatagatgaagaaactgaaggccagaaaattaaataactagaaagtggcagagctggaattttgtccctgctcaaatttgtccatgctttcctattgtgtttagtatcagtggaaactccttcccagtggcaaggccagggcacagtctcacctagctcatctttctgccccatctccactctcagcctctctctggaatcctcttctgtcccctcttcacgggctgaacctgtcctttttcttttcatttttaaaatttgagatggggtcttgctatgttgcccaggctggagtgcagtggcacagtcacaggtcacagctcactgcagcctccaactcctgggctcaagtgatctttccatctcagcctccgaaagtgctgggactacaggcatgagccaccaaacctatccttgcctcactgcaagcgcaagttcctcaaggaagtcctccctgacctccgagagcacacacccctccctcataacatccgtcacagttctgcttttgcatttgatggagtgactccttggttcatgtctgtctcttctgacaaactggaagctacttgagggcaggggccagctctgaggtgctgcacttggaacagttcccacggccttacggaacctttactgtccgacataacctggcttcccctcccctgcctgactcttagtcactccactgcagccacgccacaggcacagccccacctcagggcctttgcacgtgctgttcccactccctagtgtgctttgccagatgcccacctggctccctcccgtacttccttcagctctttctcaagtgtcttcttcccactgaggcctttccaggcctcttatctaatacctcaccccagtccttcctatcttttcctggtttatttctcttctcctttttcttttttttctttttttttttttttttgagacagagttttcttttctttctttttttttttttttttgagaggaagttttgctcgtgttgcctaggctggaatgcaatggcatgatctcgactcactgcaacctccacctcctgggttcaagagattctcctgcctcagcctcccaagtagttgggattacaggcgtttgccaccatgcctggctaatttttgtatttttagcagagacagggtttcaccatgttggcaggctggtctcgaactcctggcctcaggtgatctgcccgcctcagcctcccagagtgctgggattacatgcgtgagccaccacacctggtctctcttctctttagaatggcttcctaacagatgacattttatttatttctcttgtctgcttgtctactctccccactagaaatcagctgcatgagggccggggctttggtttgctttgtttgttttatctccagtgcctggaactgtccctggcacatagcaggtactatataagtatttgctgagtcagtgaatgaatgttttcacttaccactgcatttctgatgtccagcacggtgcctggcacacagtgagtgattaataaacatttgttgaatgcatgaacaaatgaatgaacaactcccacctcttacagtttctgccgttctcccggaagcctttggcaaagggattggctgcaatcttcagttgtgtgatctggggacacacatgcagggtcaaagcaactgcggtctgggcagggggccaccaccccctcaagcagggtcactcacctgtgggttctggtaggctgtcacggagatgaatgtggtctcggggaagcggaaggaggccatgcccccccagtgctggctgcagagctgggctgcccgaactaggtgtatgcggggttggtacttgtgcatggagtgcaggatcagctgggagggaggaaatgggagtgattccctgccctgcgcctcacccttggcctcccttccagcaccccccaaccctatcctggagtcccagcctgggcctcacgtggccgtgggggtccagcgtgctgttggtgagcttgacacgatggaaagacacaggctgccgcatccaatgtgcaccagtggcaggagagtcggggtgaatgtagacacggtcaggcaggcggggctctgccttgccgctgggctcccagcgccggccctgccagcggtagcgagccccatccaccggaatcacatccagaagaaacaagtagcgggcctcggggtccaggccagtgactgacactcggcaggcagggaacatgcgcctgtgcaagggaggggacaggagaggcctggagctacccactggccaggggtgggcccagcaccagtaacgggacataacaacgggctccccagagctgtcagagaaacatcaaaggaggtggaattagaacccagagggcaggctggaggctgtggctcacacctctaatccctatactttgggaggccaaggtgggaggatctcttgagtcaggaattcaagaccagcctgggcaacatagaaagaccccatctctacaaaaaaattaaaaaattagccaggcatggtggtgcacactgatagtcccagttactacagaggctgaggcgggagggtcacttgagcctgggaagtcaagactacagtgagccacaattgcaccactgcactccagcctgggcaacagggcaagacactgtctctgaaaaatgaaaaagggccaggcgcagtggctcatgcctgtaatctcagcactttaggaagccgaggtggaaggatcatgaggtcagaagtttgagaccagcctggccaatatggtgaaacaccgtctctactaaaactacaaaaattagccgggtgtggtggtgtgtgcctatagtcccagctactcgggaggctgaggcaggagaatcgcttgaatccaggaagcagaggttgcggtgagctgacgagatcgtgccactacactctagcctgggcaacagagcgagactccatctcaaaaaaaaaaaaaaaaaaaaaaagaagccagagggcggaatcttagagctggaaggttttcttgtctcattttacatttggggaaacaggacagacgggttaagtgatctgtcacacagcaggttaggaacagagccatgactcctacccctcaaagcctatttgcagaagcaggggtgactaactttcttgctaggagcttcctgtccccaccctcctctcctcccctgatctccagcaccagaatctgcagctcttagatgaatttgctttagaaaaaatataccctgcctgcagtagggccgaggactttccatgctagggcttgagttcctgccccagctaaagacctcatctaaggtcaaacactgaccgtgtccctgcctctagggtgaccctggacctagtcatatactgactcctattcgagttgcatactgatcccgaatcctggccagatttccctgatgctggtcaatgggctggcccttgaccccctgtccttgtctggatgctggtctaagccacacactaacctataacccagagggacttcctgaccctgccccagactgacccatgacccttgccatagattggtccctaaactcagccacagactccacagactggcccttaacccttgtcacagagtgactcctgattcctgccacagagtaacccttgccccaggccatagtcagattctaggcctaggcagagctctagcccctcgggaaccacccagtcctagccccctccccagggactctgcctttcccaagagacccccaccagaaacacggaccctggccagcccctcacctcccagctttggtgatgatcatttctgttcccacagagctgaactccttccatagctcccggttctccaggctcaggctgacccccgggagggaatggagggcctctggagctgatggggccggctcagtgcccatggcagggggcagaaggggcagaggtgggtgcgcggccagggtgcggggagcagcctccatcccggagaggaagcaatccagtttaggggtgtccagttctggaagccggggaagaatgaggagccagccgagggccacagcccccctattctcctacccaggagctggtcccaacgctcaccggggtagcggtagccctccgctagggcgggtgggaagctggagtcggccccaggttgggcgggccccaggcggtagccggcccccagggacgggtacaattctcgtggatggtacatgttgtagttccgtctggcctcaggtctcgctgcttagggcccccggtgctgcgagatgccccctttatagctcacagctcagccccttccagatccaggatcacagcccctcccctctttggggccctggagttgggctggggtggagacccctggggcctcgaaggggtccgagagggggtcggatacctgggtacggtcccctcctcccctccctccccaccccgggaggcttcattagcctcgaccccctgccccctcattacataattaactcctcggcttgattgatccccagggctcggacagggacgcagtttggcgcttccggccagctggtccccgttcccacggtggggagccccggctagggataagctggggggcggggcctggaacctggacggagccaagagtcccgggacacaccttggcgccccagaccttctggcaggtgaccgccctccgccccccttcacttggaggccgggccctggagggaagcagcgtgaacagagggaaagtgcaggctagagggacgcggcctgagctgatttcacagggcactcggggccgcgaggaggccgcagcccagtcccgagcaccgtagtcctccctggtccccatgctaaaaaaacctccatcccgagccaagcctccaaagttcgaaggcgctcacagtccgacagcttctgacgcctcgcgccagggtttcccgaaggtcccgcgctggggaaccctcggaactacacttcccggcaggctcagcgctgaggcgcgcccgaaggagccggacggaccacgcgggggccgctgggagttgcagtccgaccgcgagggggctgcgaggccggcggcgcggttgcctccctgggacgctgcccctaggcggcggccaaacgctgcagatgagcagacgcagatcagccgaggtcacggcgtaggcagccagagtgggctcaggacctccgccagcagtgaaaccgtcccggttcccggagacccagcttggacggctgtgcctaccccatgccccgccggggctcagaaccgcacaggtctataggggcggaaatctccgcttgagctcccccttcccggattacacgcgagcctgagctgtctccactccattgttttattatgtacaaacgctacagaacgagggggacagacacgcgtggggtaagaagggcctggtgggaggagttcacagagcagacggtgcactgggaccaggagagcagaacacaggccataactatagggcaggtggggcaggaacgggttaaaaacgagatccaagccagccagatcgcaggaggtgcgggggcgtcgtcccccttctgttctccccccaaggtcacagtgcatgcaataaaatatatatacaggagctagatccgtcctctgcaggggctctgagggtccagagctcccttcgggtggcgggaagccagtggcgctccctggcggccaggccgggctggagccacatgcgtcgggggagcgggggtcagtcccagccgttgtctttgatcatgtggttgagttcaatgatgtacttcccctctttgtacttctggctgctctcaaaggcctgttcctgaaaggaggggcgggaccgtcatccccggagcaacagtctcaccacaaggcactggggttgggaagtggacatgagtggccccattttacatatgaggaaactgtggcccagaggggcagggccgtatttctcacaaacacagagtagaatagaactccctgactcaaaggtacttttttaagtactaatgatggctccaacagagaagatagggaagtggctaaaagatttcacagttcagggtttgcaaactggtagcttcatggccattttggcctacaacatgtattatgtttggacagcagacagtttaataaaaataactttaaagtattaaaatataagtaggccttgctcactccagtttgcccagcctgcccccaactcccaaccctgccaatctatgctaccctttacacatctacagtatctgcttggccttgcaggcacttgaggtttttttgtttgtttggttttgagagggagtcttgctctgtcgcccaggctggaagtgcaacggcgcgatatcggctcactgcaacctccgcttcccgggttcaagtgattctgctgccttggccccgagtagctgggattacaggcgcccaccaccacgccgagctaatttttgtatttttagtagagatggggtttcaccatgttagtcaggctgttctcgaactcctgacctcaggtgatccacctgcctcagactcccaaaagtgctgggattacaggcgtgagccaccacacccagcctggcacttgagtttttgacctcttgtttaggccagctctttattaattattattatttttgaaacggagtctcgctctgtctccgctcactgcaaggctctgcctcctgggttcacgcaattctcctgcctcaacctcatgagtagctgggactagaggcgcccgccaccacacccagctgattttttttttttttttttgtatttttggtagagatggggtttcaccgtgttagccaggatggtctcaatctcctgaccttgtgatccacccgcctcggcctcccaaagtgctgggattacaggtgtgagccactgtgcctggccggccagctctttatttggtagaggtccagagtggccaagccacctgtccagagacacacagccaatctgtggcagggtcagcagcgagctcaggtcagggctggctggctggctctgcctgggacatccacctcacagaggcaccacagttccaagcgacgcctgaagaatcctgtcccttgcagtgtcccaagagcatcttcctgagcatctaatctgatccctgtaacaatcctgggtgctaggcagtggctttatcttccactgagagataaggaaatgagactcagggtagtgaaatcagaccctggacagcagcagtggcaatgaggactatggaaagggaggctggtgaacccaagctccatgttgttgcagagtctggggcaatttttctgatactctaaatgacaatataagctggtgaccaagggtttggagtgaaaaaaaaaaaccaaccaaccaactcagattctggtccctattctgttacttaccagttgggtgatcttgggcaagttacctaacatctctgggcctccctgtcttcttctgtagagataataatagcttctacctagaggatcactgcaatgattgaatgagataatagacgccaggcacacaacagtgcaaggcacataaacattccataaatggtgactctgattatatcctaactctctaatggggatccaagtgcctgggagagaagggatgggttaagagaaaagttctacaccccttgcaaggtgcaagataaagagaatgtggtcagggatgctgacttgtgtgagctcggcctatgcaatctgaaaggctatagggtgacagcttgtcaggaggaggtgttggaaggtcaggtcaaaggctagcctggggtcagaggtgggtgactcacatatttccagcccaaagtggtcttgcagttctcgcagtggatgtcggcgacagcatggaggccggtcagcagcacccgctcctcggctggcccgcagcccacgttcaccctgtggggacatggggtagtcccagggagggtcctgccatcacagggcccaccccctcaagcactgtgtctgtcctcagcatccaagaaatgatgctcacaatttcctgcctgcaccggggaactctgggagtctcagcaggatgccaggggtcacaggtcacaacagaggtcagggaaagcaagaagggaggccagatactcacactgagttgaagaggtaggcacgcccctgactgccctggaaggactaaagggtgagagggtgggaagagaggagggggtcagggctgccggtggggagctgccaggcagcccctataggttccagccccactgtggcctggttggttaccttggagatgaggtcgtcgtggttggccaggtgagcgcggcagtgggcacagctatacctccggtgacaatcatccaagtaggcctgaaacgtcttgggctttgaaatccgcaccatggcgggggccgggggcagtggccccacgcggggagcggcccacggggagcagagggagcccagtgcctgccggggagggagtaggtgggctgtcaggacctgggccacacacatgcgaggcactcccagagccgtggggactcgctctgtcacactgggctgctctctcctttccccagagccagcagcctctccggggaccagaggcgtctcggttttgactcagtgaggaggcctcaggttgcatccatggggaaactgaggctcggaggtgcccagggtgagtcacccgcctgcttccggcctcacccttgctgacctggcagctgaagctggaggaaggggctttggaggggctgggctgtcagttcccagtttcgggggagcatgggcgggtaggcactggttggtccttgcgacctcatctggagagcagtggggttcactggtggtttagggggttcatcggggagagggtcccccacctggaggaggtaggaggcctcgccgtgaaggttgagggtcacctaggaggggaggggctctcacctgcgggcgccaaggcctcctctacgctcaggggctcttacctgcaacgcggagccttacctggactccggggctcacctggggcgcgggggtgggggcgggcgccgggggagggggcagtcctcgcgggctgggcaggggcgcggggcgacacgcagccctgacggcgcgggcctcacctcgcctgggcgcgcggggcccggtccgccggggtgggctggcctgggagtggggggcgctcctggcgggcgccgtcccccccgggcccgggttcgcaggcgcctggacttgtttacaccgagcccagctgctgccgccgctgcggcgggagggggaggggacccgcctcctgtcccggcggccgccgtggccaatgggcgctccgcatgcaaatgagggggcgcgtcacacggcggccggcgcaggccccgaccgcccctcccccgccgcccgctcccgccggcccggaaatgcggctgcggcccgcgcgccccaggcctgctcgcattcctgcttgtggcccgcgcaggggcggggtcggaaggtctaggccgggcgcggagcgaggaagcgggtggcgctgggacgcatgctctgggggagatgagtataatgacccgcgtttgtccgccgcccgtgccccgctcaatccccgcatcaatcccgtgaggccgtttctcccgttggctccactgtaccgggggctgaggcccagggaggtctcgcggctccctaggttatccagctagtaagaggcgaagctggaattctcactgtgggcccattccatggcttttgccagagcgccagggacacactcagttcaccttctagcagggaagacccaaagatgcgcgcccctggcagccagggcgtcggaccaggcaattcctactgtccagcatcacctcctccaggcctctcggatgcctctgttgggacagctaagttcctcttcaaagactcaatttcctggtcataagctgtaaacagattctactcccgctttttcttctttgtcgcacgtctaccctatttgggaaagtttaaaccttagccaatcgggatcagctcagattgtgcggtccaaccccccagccaatggggaaaggacacagaaacaggaactgcgttagggttaaaaaccacttccctcctttgttggcgggtgctcttgggattgcaaccagcgcaagcagcacccttctgcagaagtaaagatgccttgctgggaagtcttctgtctcagtgctggtttttcttgactacactgagcacttgttttcaacaaatttgagggtcttctgggatcccattctcctttgggaggggtagcgattacttttcctcgtgagacacgtcccactgccttgttgcagtggcccaaggagcggaggatcgggtccacccaaagtgaggaataaatccggactttcagcaacgtgggcaggaaggagccttaaaattcccaggcaagtgggtaactctgtgcacagaccaaggtaagaaaagttgctactggggcgacaaagtatttccttggtggttggggtcacttggaggttgaaagtgcatggctgagacatgtcagtggacacgaatcgagtgtggagtccagacttggttccatggtcacctcataaggcttagggcggttttccagtcggggattataccgacccgctaatgctaagaggggcctgaaattcccacgagggaagcggccaaaaagtacgaagcgattattcatatgagtgcaagaaacctccaatgggaaaagggagaggttaagcccctaggaaatgggcaccaacctccagaatgggaaataccccaagtaagacagggagtacaaaaggccaagcagacaataaaattccccctgacagtcctctgggccttatgttagagtactggaggtataatgaaagaaccatgtaacacaaggaaagacagtgaatgataaaatattgctgttttatttggaccaaagaacctatcctcagaccctcagtcttttggccaaagtttggatcagacgaggattggatatgccaactcttaatccagtatgttaataaaaaaagtccagtctctcaagaggaaatagattatgctctgtgttggagacaggaacatgtccttccctttcccttaaaggatgacgtaaaagagaaaccaaactcagtaccctcctaggacaacccagttaagtcagattctacatctaaagatgccaatgtataggatcccctagaccatcttcccccgcctaccccacctcaggctaatcactcagtccctcccccacataaccctgccctgtgggccttgtggccccacatccccattgagcagccacccgaacatgtcctttcctcaggaaaactccagcacgagatggaacaatgccggagggatattcagaactttccttttccctcttcctcaaaggggtctgccccaaccccttttcccttaagtaccactgggaggagggggtattggtttcgtaaatgcccccttaactagttcagaggttagaaatctgaaaaaggaactcaaaccattatcagatgatccttttggagtcacagatcaaattgaacaatttttagggccgcaattgtatacttgggctgaattaatgtccatcttaggtattctcttctcaggggaggaaagaaccatgatccgcagggctgctatgatagtctgggaatgtgaacaccctcttggtcaaaacatccctgcagcagagcagaaattcccagcccaggaccctcagtggaataggaacaatgcagcccactgagaaaacatgaaagacctcagggatatgataattaaagggattcaggaattggtgcctcaaacccaaaatatttctcgagcatttaatgtacaccaagaaaaagatgaagggcccatggaatttttaaagacacttaaggagcaaataagaaaatattcaggcttagacatagaggacccacttggacaagggatgttaaagctctattttatcaccaacagtcggccggacattagaaagaaattacaaaagatagaaaattggcaagactgctccatagaggaacttttaattaagagaggctcaaaggccgggcatggtggctcaagcctgtaatcccagcactttgggaggccgaggtgggtggatcatgaggtcaggagatcgagaccatcctggctaacacggtgaaatcctgtttctactaaaaaaatacaaaaaattagccgggcgtggtggcgggcgcctgtagtgccagctgctcaggaggcttaggcaggaaaatggtgtgaacctggcaggtggagcttgcagtgagctgagatcacgccattgcactccagcctgagagacagagcaagactccgtctcaaaaaaaaaaaaaaaaaagaaagaaagtgattaactctgatttgggttccaccgtcagatttatttattgatttattgatttatttattaaaaaaaaattcccagggaagtggtcaggagaaaacgataccctattcccttagaagctagaatggctctaaaacctataattgagggcctcgtccatgacggaccccttgaaccctgtatgtccccttataacactccaatattgcctgtaagaaagtcagatgggtcataccggctagtagaagacctctgggctgttaatcaaacagctcaaactacccaccctgttgttcccaacccttacactattatcagcaaaatcccatatgatcaccagtggttcacaatgatagatttgaaagatgccagctgggcacggtggctcacacctgtaatcctagcactttgggaggctgaggcgggcagactgcccgaactcaggagtttgcaaccagcctgggcaacacggtgaaaccccgtctctactaaaatacacacacacacacacacacacacacacacacacacacacacgccaggcatggcagcatgtgcctataatcccagctactcaggaggctgaggcaggagagttgcttgaacccaggaggctgaggttgcagttagccgagatcgtgccactgcactccagcctggcaacagagccaggctctgtctcaaaaaataaataaaataaaaaataaaaaaagaaagatggcttttgggcttgccctttagcggaagacagccgggacatgtttgcttttgagtgggaggaccctcacttaggtcgaaaacagcagtaccagtggacagtcctaccccaggggtttacagactccccaaatctattcggtcaaattttagaacaagtcctagaaaacttttcccttccttcatccatatgcctactcgaataggcagatgacctgttcatttcaggaaatagcaaggaccacataaccacagtttcaattaacttcctgaatttcctaagggaacaagggttacgggtctcaaggagtaaaattcagtttgtagaacctgaggtaaaatatctaggacacctaatcagtaaaggcaaacggaaaatagtacctgaacgaattgaaggtgtcacatctctacctttgcctgaaacaaagcaggaacttagaaaattcttgggattagttggatactgtcgtctatggattgactcttatgcctgaaaaacaaaatctctacataaaaaactcacccaagaaggaccagacccccttctttggaccctatcagaagtccaacaagtagaagagttaaaacacctacttgtaactgcccccgttatagctttgccctccttagccattccaccttttcatcagtgtaaacaaggggttggctttaggggtactcacccaaagacacagaggccactggcagcccatagccttcctgtcaaaagttcttgacccagtaacccaccgatggcccgaatgtgcccagtctgtagcagcaactgctttgctaatggaacgaagcaggaaaataacctttgggggaagcctcattgtatgtacccttcatcacgttagaaccattcttaatcagaaggcaggaagatagctcactgactcaaggattttaaaatgtgaggctatcgggtgggtgtggtggctcacgcctgtaattccagcactttgggaggctgaggtgggcagatcacaaggtcaggagtttgagaccagagtgcccagcatggtgaaaccccctctctactaaaaatacaaaaaattagccaggcatggtggcgcacgcctgtaatcccagctacttgggaggctgacgcaggagaattgcttgaaccccggaggcggaggttgcactgagccgagatcagccactgcacttcagcctgggcaacagaacgagactccatcctccacccaccccccaaaaaaattgaggctatcttattagagagggatgatttaacattgaccactggtagttcgctcaactccgatgttttcctaacaggaaatccgaaccgggaggaacctgagcataaatgtttagatctgatcagttatcagactagagtcagactgcatctaagcaagaccctgttccaaactgggcattacctctttatagacggctcctctcgggtaattgaaggaaggaggcataacgggtgctctgtagttgacagggaaaccctcatggaggtagagtcagggagacggcccaataactggttcactcaaacatgtgaactctttgcattaaatcaggccttaaaatctctgcaaaatcaggaaggaactatttacactgactccaagtattttggagtagtccatacctttggaaagatctggactgaacgaggcctcattaatagtaagggccaggaccttgtctataaagaattgattatgcaagtactagaaaatcttcaactgccagaagaaatagtggtggtccacgtcccaggacaccagaaaaacccatcttttgaaaaccggggaaataacctcacagatcaagtagccaagcaagttgcctcttcctgagaggcacccattttccatctgaccccttgccttcccctccagtcgcaatccccatcttctccgacgcggaccaagaaaagttaaaaagaataggagctaaggaaagctcagagggaaggtgggtattaccagacgggagggaaatgctgtctaaacctcttatgagggaaatattatcacagctttatcaagaaactcactggggtccccaagctatgtgtgacacagtcctcaaagcctatgggtatataggaatctctaccctcgctagtcaggtggcggatagttgcctagtgtgcaaaaaaactaataaaacccgaaggaagcagcctttactttatcaagggaaccacccctataattgccaatccaaccagtgcaacccagtacttacctctattactacccctacctccaccgaccctaactccactctaggttgcttctatggcttaggagccgatgttactggaagggaccctataggcttctttgaaatatgttttgttcacccttctccacctcctaccgtctccccctccccaagcccaccaaatcaaaccattcctcacctcttacccaatgacaaaaccaaagtagctatagtagaagtcaaggacttaaagcaaaccctagccattgagaccgggtatcaagatgcaaatgcctggctggaatggattaaatattcttttcgcaccctgaataaaagcgattgttactcttgtgcagcgggcaggccggaaacccagattgtcccctttccactcagatgggccaaccaaccaggcatggactgtatggtagctctcttccagcacaccacagcctggggaaacaagacgtgcgccactctttcactacgtttcccaaagatcaggagccctacgggtcagctcccaaggaccatttgacttccacctctcaatgccagttacaccttgtgtctcccacaacaggacaaattgacgttccttggaaatctaatgggagtctaaaccttttcaagagctaaccaatcagtcagcccttgtctatccccgagcagatgtatggtggtattgtggactgttactgggtacgctgccaagcaattggagcagcacttttgctctaatccagttggccatccctttcaccttggcatttcatcaaccagacaggaagcaagtaacccaaagaaaaagagaagcccctcgtgggcctttgacccccatgtttacatagacagtagcagggtcccacgggagctaccaagtgaatttaaagcttggaatcaaatagccgctgggtttaagtctgttttgttctggtggtctgctataaataaaaatgtagactggataaattatatatactacagcgagcagcgattcgtcagttataccagggatgccatcaaaggaatagctgaacaattaggccccaccagccagatgacctgggaaaatagactagcccttgacatgatattggcaggaaaaggcagagtctgtgtcatgatctgagtccaatgttgtacttttatccctaataatacagccgccgacgggaccatcacaaaagctttacaaggccttaccaccctggcaaatgaattagccgaaaattctggactagataacccttttatgggtctcatggaaaagtggtttggaaaatggaaaggactcctggcttcaatctttacctctcttgcaattgtaacaagtgtacttatccttgtgggctgccgcatcataccttgtattcgtgggttaactcaaaggctcatagaaacagccctcactaaagccttcctctcttctctccctccatacttggacaagctcttgctcctggataatcaagaagaacaacgaagccaaatcctgttaaaattttttgcagaggaagaagtatcaaatagaagagaggaaattgttgggacagctaagctcttcaaagactcaacttcctggtcataaacttctccccgtttttcttctttttcgccagtctaccctgtttgggaaagtttaaaccttagccagtcgggatcagctcagattgtgcagtccatccccagtcaatggggaaaggacacagaaacaggaactgcgttagggttaaaaagcccttctctcctttgtttggggtgctcttgcgattacaagctgcgcaagtagcaccgttctgaagtaaagatgccttgctgggaaatctgtctcagtgctggtttttcttgactacactgagcacttgtttccaacacccctgtgctccaggctgggttaggtctgatctcagggaatgtctgtttcaacacgtgtctgcagttctttggcttgtgttgctcactgcagtgggcccagcctggtctagaggaggcgctcaggaagtatctgtgaaatgtgaatgtgtagttccttcagtgaatatggccctggggctgaagatggcagaagcattctgggagcttctggagaaggagacctgggaggagaaggttggaatggcgggggcagcagaggggctgggtgaactcagctgtcccacccaggcccatcctctgcagcccgagaaggaagctcacagggcaagacatggaagagatcaagttccctgcccggtgcctgggctgttgatggcctcaggaaaatggaaccattacctgttgctgtcaagtggctgggggccaggatgcctgggttggccgtgagaggacattgctgaggagagtggaggccaggctggggtggggtgtggcaggaggacaggaatgcagtggaaccagtgggtcaggctcctgagggccccaggctccagcctcagggctggcctgttccctcctaagctgccatcttcatatcttcaggacccacccctctactcctcaccctcagcacaacgatgtgatcgaaaggcaaatatttatttttcaggaagagaaacaggagacctcgaggcttctggacttaggaggtccgggcagctggtccatggttgtccaggtagtgccgcagggctgtgggataatccgttatgacgccagtggctcccacgctgaaggctgcttcaaaatccgactcttcattaaggcaccaaaagaccacctgagcagggagggagggggcctgtagattctgaacaattttacatctggagagtggggacccacctcctcctctatggagactccccagcagcagtaggctggagctgattgttaaattctcaggaattttgcaaagtggttattaaacccagccattattaaaaattaaatcatagcctgggtgcagtggctcacgcctgtaatatcaacactttgggacgccgaggcaggagttgaggccaggtgtttaagatcgagtgagacctcatctctacaaaaaactttgtaaaaattaattagcccggtgtggtggtatgcgcctgtgctcccagctacttggaagactgaggtgaaagaattgcttgagcccaggactctaaggctgcagtgagctatggttgcaccactgtactccagcctgggcgatacaacaagacctcgtctcaaaaaaaaaaaaaaaattatatatactgacaattaaattatttatttatttatttatttattttttgagatggagtcttggtttgtcacccgggctggagtacagtggcatgaactcggctcactgcaagctctgcctcccgggttcacaccattctcctgtctcagcctcctgagtagctgggactacagatgtccgccaccacgcccagctaatttttctgtttttagtagagatggggtttcaccatgttagccaggatggtctcgatctcctaacctcgtgatccacccgcctcggcctcccaaagtgctgggattacaggtgtgagccaccgcgcccggccctaaataaattattaaaacaacaagtggccaggcgtagtggctcacgcctgtaatcccagcactttgggaggccgaggcaggcagatcaactaaggtcaggagttcgagaccagcctggccaacatggtgaaatcccatctctactaaaaacagaaaaattagctgggcgtggtggcgggcgactgtaatcccagctactcagaaggctgaggcaggagaatcgcttgaacccaggaggtggaggttgcagtgagctgagatcacgccattgcactctagcctgggcaacagagcaagactctgtctcaaaaaacaaaacaaaacaaaaaacaaaacccaaaacaaacaaaaatccagtaataaatattcaaagcatatctcttgctaatcagtttcctattactgtgttcttgaagtgattaagtctgttgaggctgcaagatggaaatactacatgatggggtgccaccatgcatctcttcccattctgcatttagtggcttcatgtcggcagcctgaaactggccaagatgggagtatttaaaccaggaaaattaatcctcaaatcagggctttcatttgttcctctctgagagctagttgttgaccacttaacagcaccaccctcccccaaacccccattccactgccacctgccccagctcctgcagctctgccccttccctgcccgttgagtgggcactgaggtaggcggagatgggaattttttatttaaaaatacagatgagacgaggtctctctgtattgccaacactggagtgcagtggtgtaatcacagcccactgtagccttgacctcctgggctcaagtgatcctcccacctcagcctcctaactagctgggactacaggcatgcactaccatgcccagttaatattttatttatttatttatttatttttgagacagtcttgctctgtcgcccaggctggagtgcagtggcgtgatctcggctcactatagcctccagctcctgggttcaagtgattctcgtgcttgagcctcccaagtagagctgggattacaggcatgcgccaccatacccggataatgtttacatttttagtagagatggggtttcacaatgttggccaggctggtctcgaactcctgaccttagttgatccgctggccttggcctcccaaagtgctgggattgcaggcatgagccactgcaccctgcctctgcatttttcttttctttcccttttcctttcctttttcctgtttccctccctctcctccctctccctgtctctggctctcacgctctttcctctctctcttttgagacagtctggctatctctcccaggctggagtgtggagtgcagtggcgtgattctgattatagctcactgcaccctcgaaaccccgtgctcaggtgatcctcccatctcagcctcctgagtggctgggactacaggtgtaaaccactgcgcttggctaatttttaaattttttgtagagacgagggtctcagtatgttgcccaggctggtcttaaactcctgggctcaagtgatcctcccaccttggcctctcaaagggctgggattacaggtgggagccgtgcccagcctctgcctatggcatttcttccctgtacccttgatgggaagctcccacccctagtaccatagtgcctggaacattctcaaggatcgtttactaattaaatgatctggtggaagccaatgctcaggggagaggggggtgggctgggcctggtttctcccatctctcatctttccccagccccctctcatcagggatcatgatacatcattgttgtcatcataatggctaacatttatcaagcccttaataagtactagttacatatccatatgttggcaatgtcaggttaagaaaatatgtgcgtggccaggcgtggtggctcacacctgtaatcccagcactttgggaggctgaggcaggtggatcacttgaggccaggagttcgagaccagcctggccaacatggtgcaaccccgtctctactaaaaacacaaaaattagccaagcatggtggcaggcacctgtagtcccagctactggggaggctgaagcaggagaatcgcttgaacccgggaggtggaggttgcagtgagccgagattgcaccactgcactccagcctgggtgacagagtgagactcttgacacacacacacacacacacacacacacacagaagaagaaaattgtgtgtgttcgtgtgtgtgtgtgtgtgtatccagagagttaaatataccattttcccattttagggacgaagaaactgaggtgaggtcacctgcccgagtgatgcagctagttggcagcagagtgggaccggaaccctgctgccaggtctgtgtgcggtggaagtggtggtcacggcctcacctgcacccctcgctcctccaagtgtcggatcagactcttcctcatgatcagcctgggggtggggtggggacgtgggaggtgatgatgagaggggacctgggagaagggcagcagtaggtctctatggggacacgccacccagccatcttgcccacctcaccatttcgaaaccacagccaataactggttcaggcaagagcaggaaaatgggaaataggtcctgcagagagaaggaagtgggggttagctcctagggtctcccctgtcccagaggtggggtgggctggtagtgcccccgccaactagggtagcgctgccctcccaccccccagaatcccccagaataacctttgtagttgccccagtgaacaattcacccattgttcagagagcctactctgaccaccacgcttcaagggtgtggccctccagtcaccattcaccagataaggaatctgggccttagagaacgaaagggacttgccagacccaaagcagagtggtggtggggctgggccagggcctcgcttggttccaaagctggacatccaggctgcaggccctcctggttgggcctggccagcttcttatttatctatttatcttattattaatttaaattaatttttttttttttgagacagagtcttgctctgtcgcccaggctggagtgccgtggtgcgatcacagctcactgcaagctccgcctcctgggttcacaccattctcctgcctcagcctcttgagtagctgggactacaggtgcccgccaccacgcctgctaattttttgtatttttagtagagacagggtttcaccctgttagccaggatggtctcgatctcctgactttgtgatccgcccgccttggcctcccaaagtgctgggattacaggcgtgagccaccgtgcccggccattaaaaaatttttgtagagacatgtctcactatgttgcccaggctggtcttgaactcctggactcaagcaatcctcccgcttcagcctcccaaaagtgccaggataataagcacgagccagccaagtgtggtggctcacacctgtaatcgcagcactttgaaagtctgaggtgggaggagaccagcgtggccaacatggcgaaacgccgtctctactaaaaatacaaaaattagccgggcgtggtggcagaccctgtagtcccagccacttgggaggctgaggcaggagaattgcttgaacccaggaggcggaggtttcagtgagccaagatcgcactactgcactccagcctgggccacagagtgagactccttctcaaaaacaaaaaacaatggccgggcgcggtggttcacgcctgtaatcccaacactttgggaggccgaggcgggtggatcacctgaggtccggagttcaagaccaccctgaccaacatggagaaaccctgtgtctactaaaaatacaaaattagccaggatggtggtgcatgcctgtaatgccagctacttgggaggctgaagcaggagaatcgcttgaatctgggaggcggaggttgcggtgagccaagatggcaccattgcactccagcctgggcaaaaagagcaaaactccgtctcaaaaacaaacaaacaaacaaaaaacccacaaaaaacctcgtgagccactgtgcccattggccagcttcttgagaccagacagcacttagtgggacgacccctaattatcccactccaggggtgactttagagacccttgacagtgtcctagggcaggctctggagtcagacccagggaaaacctaagctctggatttccagctgtgtgtccttgggcaaattacagaacctctctgggcctcagattctctagggtaccatgggagtcatgattcttatacctcctgggggtgctgcaaggtaaaagtcaacccaaaatatgttaaaacactttataaatcttgtataaggccgggcgcagtgggtcacgcctgtaatcccagcactttgggaggccgaggcaggcggatcatgaggtcagattaccatcctggctaatacggtgaaaccccatctctactaaaaacacaaaaaaattagccgggtgtggtggcgggcgcctgtagtcccagctactcgggaggctgaagcaggagaatggcgtgaaccagggaggcagagcttgcagtgagccgagatcacgccactgcactgcagcctgggcaacaggggaagactcctcaaaaaacacaaaaaaaatccggtataaaaaggtggtacacaaatatcattgatctctttgtagcaaggtattgtgggggctgagtgggacttccttctggacaacagaggggagcagagagctctgggactaccacagagaagctgtcagaaagcaaagggagaccgggcccaggggctcaggtatgtaatcccagcactttgggagaccaaggtgggaggctcgcttgagctgaggagttcaagagcagcctggtcaacatagtgagaccttgtctctacaaataatttaacaattagccaggtgcagtgttgcacgcctatactcccagctacttaggaggctgaggcaggaggatctcctgagcccaggaggtcgaggcgcagtgagtcatgatctggccactgcattccagcccgagcaagactgtctcaaaaaaaaaaaaaaaattgtaaagcaaagggagggactaggcttaagtgccagcgaagtatccaaattcctgatcctttccccagctgttactttgttaacccctgccttcctgcagaacactgacttggccttttcctgctgagggtctgagacagccgtgctataattaatgaacgaatgtctccccagccagactgtaagctcaccaaggacctctccccaccctcactggtctcatttacacattataactgcacctgggacagagtagacattcaataaaatatgctagatggcctgagatggataaattacctctctatcctaaaactccacatatgcacagaatttcagggtgttcacagttcccttagtattcatgaatgctgggtaagaaccactgtccttaaaagaccttgggggttatctctgaggggagctggggagctgggaagatctgggctccttctccacggagaccctaagcagtggggagtttttctgaggtccgccccccactggtacctgttgatgatgttgggcaggaagcagaagaagaacttctcagggattgggatgaagggcagcagccccaggtagtaggaaagcagcacccagaatcctcggcttattgtgaaggacaggggcatctcggggttctggggaggcaaggagaggcatgagaatctgtctgctctggggaagcagagaggaggcatgagctgcaggggagccgtggtgggcattccagaggccctactacctgcaggatccaagtcacatcttggggctgggtgtggtggctcacgcctgtaacctcagcagtttgggaggctgaggcaggtggatcacctgagatcaggagttcaagaccagcctggctaacatggtaaaaccccatctctactaaaaatacaaaaattagctgggcgtggtggcgtgcacctgtaatcccagctactcgggaggctgaagcatgagaatcgcttgaacccaggaggcagaggttgcagtgagccgaggtcgcaccaccgcactccagcctgggcgacagagagagactgtgtttcaaaaaagaaaaaaaacaaaagtcacatcttggctctgtgttcgaggcctgagttcacacccttttcattgccaccgccacgccactgggaactctcccagacccctctagctcgggtccccatgctgggtgggctccagctctggggaggaggggcccctggaggaggaagaggacgggggaggggtggggggactcacggcagccttgcatttcttcatgaccgagctcttctccgaggcccagatggtgatttcattacggtcatagcgtctcaccaagcctgctatctgggaggaggagaaggaggtgaagggagagccaggcctctctcacgcccccggtggccgccctagccctgcctgcagcaccacctcacggatgagctcttcgttcttccctttgatctctacgctcatgggtgtccttggaaacctctggaacaggtcctccagacgaaccatgcgccggtctgacccgtgagcaaagtggcctgggggtggtgtgggaaaaggggtcagagggaagccaaggcggaggtccaaggaaggcaggcatggcccaggcagggctcgaagcccttgctctcacctggagagaagtaaacctccagcttctccttgtagaggggcaggtcctggggaggacaggaaggatgtcactagaggcccgcattgggcatggtgactctcagggtgggggttggggtgtcagggcagggcccacctcgaagtccaggctgcccacatccctgtttaggcccgactggcggcacaggttctcatcatgtgacaccaccaccactctgtcccgtgtcagctgacagtcgagctccaggaggtccgagcgctgggccatggagctgtgggggtgaaggtcagcggggggcaggggcaggggactgggatgaggggcatggtggctgggaggtggccgggaatgtgagagcggagttcgtggcgggatgtgcaggccacctccagggggcgccagtcacccagctaggaagtgaatggcgtcccttgctgtgatgcagtccacgacctgcacaccctcacatggcagcctgggcaggggcagatacactcacttctccatggcctccatggtgttctccagcagctctccagatcctgtggggggcactggagtgggcctctggggcttggggtctaggggcctggcccaacctcatcacccacattccctctctgggctccatcctccctctggcctcacctccccagccagcccaggctgcgccagcatcttcttcctcgtccacaccctgccctgccacttcgctctccttctctcttggtccctgccccgtttctagcatgcccccttggacctacccctctgtgctgtccactttggcacctgttctcacccctacccggctcacctcctcggtgggcccccaggcggatgcggaaggtgggagccctgggcgtgtgcagcagatgaggccggcgcaggaagaagatggagagcatggcatagctgcccagggcagggagggcatagtacagcaaaaggctcatgaccgtactcccacagaagctcctgcagccacacgctcagccgtccgcgggactgtgctgcctgcctagccagtgtgggccggctctactactggccactgccacgcccctgggacctgctgagcctgccgctgggctggcttggagccaggctgcagggttcggctgaagctggggtagtgtcaggaggtgaggcaagtagccctggctctcatatccccaggcccttcccagcccccagcagccccgtcctgggctacatgaggggagtaaaaaccacccaggactgtcaggacctctccctctcactggtacttgtagccagcgcatccaacatgcctaccccttgccatttcagaggatccaggggtgtgtagggtgctcctgagtcaccccgaatcacccccagccagttagacaggaagccattagcgagaggacaggacagtgactaaggggaaaactgacccccttctttctaggagtctggagctctccagagccccgtccccagccctgggcagctgggagtgaagggcaccaggcccctgaaagcccaagtcaagtctgtcctcagagccgcacggggcagggcgggggcgtcgcgaacacagacagagccagggtcagccatagacacatctctatatttatatattagacgggtcagggaggtggcaggggcgccgggctctccacgccccccagctccacttctgctcaccacacacagaagcagcgagggcacgcgaagtgacagctttgacagggaggggattcggcccggcctggctcctcagggatgctagcccttgagactaaggaatgttccttcagggaaactagggtggggtttgaatgagatgaggggggcaggcatggccctgagtccctactcagcgccccccaccctccacctctgcccttcagcaggttggggcagccagaacccttccattccagaactgccagagactgggacgctggggaaggtaagggcgcagcagcagcagcgggagattgaactggggccacctgaggtcccgaggccccgtggggagggcgggtggggaggagaaggccttggcctgcctgaagctggaggcctcagcaaaggagagaggtggccaggcccatgctccaccccggcctgggctgccaaggtccgggctgggcacagtgtccattttctaacagtctggcgggagaggggcaggcaggaggcaggtcctaaagagagaagcaggcagaagaggagtcgttagcaccccccgggcagacccactggagccctgacctcaacatctctcatttcaccctcacagctggataggctgggtctcagtttccttatctgtaaatggagataataatagtacctagcttgaggtactgctgtaagattaaaggaattaatacatgtaaacctcttagaacaatgcttagggctttatgctttcattattagaactgtctcggccgggcacagtggctcacgcctataatcccagcactttgagaagctgaggtggtggatcgcttgagcccaggagtttgagactggcctgggcaacatagcaagaccccagctccacaaaaaaaaaaaaaaaaaattagccggttgcaatggctcgtccagctagctgggaggatcccttgcacccaggagttttgaggctgcagtgagctatgattgcaccactgcattccagcctgggtgacagagcgagacactgtctcaaaaaaacaaaaccaaaaaaaaagataaatagattgactccggaaactgaggcgccgagaggtgaggtgccttgcccaatatcacacagcacttactaagtggcacagctggagtttgagcccaggtgcgcatgccttctttctatcaggccacacctggctgaagacaggaagagaccggaggaggcaaggaggcagcgtgggtgggggcaggccagtggggtccccacagctatgtgaactgctgatctggcagcaggtgtgaggaggcctggcaatctgggtcaggctgggcgctgctgggcccctcccaaagcaatcatggccccacctgcttctgccacacccagagctgaagcttggctcaggtcctcacctgggtgacagaggccctcagtgacctcttgcctctttgccagttctgttcctagaaggagattagaatggcttgtggggctggaggatgcaaggtgttgacaggcagagacatttggggctggaggactcggtgggccaccagtctgggcagccttgggcatttttttttttttttttgagatggagtcttgctctgtagtccaggctggagtgcagtggtgcgatctcggctcactgcaacctctgcctcctgggttcaagcaattctcctgcctcagcctcctgagtagctgggattataggcatgtgccaccacacccagctcatttttgtattctttacagtagagaccgggtttcaccatgttggccaggctggtctcaactcttgaccttgtgatccacccacctcggcctcccaaagtgctgggattacaggcatgagccactgtgcccagcccttttttttttttttttgagagagtctcactgttgcccaggctggagtacagtggtgcaacctccgcctcccaggttcaagcagtcctcccaccacagcctcctgagtagctgggactagaagcgcatgcctacgtgcccggctaatttttgtatttttagtagagacagggtttcaccacgttggccaggcaggctggtctcggactcctgacctcaggtgatccacttgcctcagcctcccaaagtgctgggattaccagagtgacccactgtgcccggctaatttttgtatttttagtatagatgggatttcaccatgcaggccaggctggtctcaaactcctgaccctcaggtgatccactcctctcagtctcagtctcccaaagtgctgggattccaggcatgagccaccacacccagccccctgggcacttctgttgtcaccagacacattgaccatgggtgtggggtaagcttgctgctgtatggaggcatgtacagatagatatagatatagatatacagatatagatatttagtatcagggtgtccatgtgtgggccatggagacactcaccaggccccagggtgcagagatgtctgtctgggctagggggcctccagcactccgggctggaagcgtgctgtctcctggaagatgagctccttcagccgctccttaggtaggtcatccagctccatggcgaaggtgaagggctcctcggccactggctggggtggtagagacagcaaggctcaggcctggcatgggggatgcctacgtgcccccctgctcccctgcccccagccccactgctgctggggactggcccacctcatccgtcgggtcatagtactgctccaggtaggggtgagccagcgcttcctccactgtgatccgtttattggggttaaaggttaacatccggtccagcaggtcaagggctatggaagggcaggagtcaggggtcacagggaagactggaggagctccgagaagcattgctttgcctgtctcctccagcggctgctgggctcacacaccctccacgacacccaaggtttatcccacacccaccctcatgtctctcgaacctttggagtctgacttggggaaaagcttggcccaagccaccttggtcttggagggcagagactgtaggtagtttcgggccttcatgttgatgatacaattcaggtcctcctgggatggggagcccaggatgcctgtggataaggaggtgacttggtaaatgatcacctctttctttctgggaacagaataggcaacaaggcaagaacaagaccccccagcccagcaacccatgccaatccctcagtcacctcctagtcattagcatggtggtgcagagcaagggggctgggttcaggcagaccgaggctcaaatcctaggtctggtgcctcctcaggtgtgggacttagccttgcttttcccatctatccaatggggataatatctatacctcattgagataccatgagatgctggaggcaccccacacgtggtggtatccctgacttggactctcgagaaatctcacctcggaaaagctaatcatccccaactcagccagccgggcctccctcacccagaatgtggttgagctgatccaggtagtgcttgccagggaagatgggccggttagagagcatctcagccagaatgcagcccacagaccagatgtcgatggacttggtatagccctgggggagaggaggaagtggtgagctcctgggccagcctcaacagggtcctgttgtctgcgccaggccaccacctccaagttagatccaacaccaggcagaaggcagaggcctggagggctcaatgctcagcttccttgcagagcccaaggcccagagggtagaattcctgtgtcatgggggtcagtgtctggctcagaggtagctccagggcttcctgggaactggtccgttcctttcaggagtgggcagcccctcctaccttggagttcagcatgatctctggggcccggtaccagcgcgtagccacatactccgtcaggaagccggtgtggtcatgctcaggatcggcaatccgggccaggccgaaatcacaaatctggaatcagacctagctgctaagctcggcgctcaaggcctctgcagcctaagcagtcacgcccccttgtctttgcctccactgttccctttgcttgcaatgttctcctgcccaaggcttcttctactggtcactggaagccccagaccctgggggaggaggggacaggtgcccaaccctctgaccttaaggtcgcaggtggtgttgatgagcaggttggagggctttagatctcggtggagcacgttggcggagtggatgtacttgaggccccgcaggatctggtagaggaagtagcagatatggtcattgctcagctgctggcttttcagcaacttgtacaggtcagtctccatcaggtcctgcacaatgtagctgaggatggttccgcagacccccccaggcagggggcagtgggaggcacttggttaaggaaaacaggctctgaaggcgaggctgcacacctcctccagccagggcccctgggactcaatagatctgccaacctgcaccaccagctggggaagctgctgccattacccagcggcagggctctgagcctctgttgcatcacagttgctgatcctgagcaaggggcttcatttctgaggcctcagtttccctaccggggaaacggggataataataaactgtgggaggcaggagaacttcacagttaagagcagcaacttgggccaggagtggtggctcacacctgtaatcccagcactttgggaggctgaggcgggaggactgcttgaggccaggagtttgagaccaccagcctgggcaacatggcaaaaccctgtctctactaaaaatagcaaaattaactgggcacggcggcatgtgcctgtaatcccagctactcaggaggctgcagcacgagaatcacttgaacccaggaggcagatgttgcagtgagccaagattgtgtcactgcactgcagcccggatgacagagtgagactctgtctcaaaaataaataaattaaaaaaaaaaaaaaacctacaaaaagagcagcaactctggagttaacccatggatgtctgaaatctcctctctactactcactggctttaggatctcaacctgtctgtgcctcaactttctcatctggtatgtaggggaaataatgtttttttgtttgtttgtttgttttctttttgtggagatgggctcttgctctgttgcccaggcaggtcttgaactcatgggttcaagtgttccttccacctcggcctcccaaagtgctggaaattacaggtgcaagccatgaaataatggttcttttgagggtggttgtgaagactagatgagatggcgcatgtaaagctgtcagcccagtgcttggcaagttgtgagtgctaggcaaacatgaactattattactaatatgaatgcctgagtcacatggctgttgagggagttaaatgagataatgtatgaacaccatctggcatgcaataaatgtttgcttaaaaataaatgcctgccttatgggaatggtttgtgcaagaaaaatgaggagacactcccaacagcacactcccactcaaaggagagtgcttggccatacctcagaagatggaggagtaaaatgtctttttctatttgaagatacaaaaaagcttatgcgtaaataaataaataaatccacaaatgctgtttggcttgtctctagaaaaataagtcagggctgtcttttagaatctgccttgagaccaggcatggtggctcatgcctgtaatcccagctcttcaggaggccaaggtgggttgatgacctgaggtcaggagtttgacgccagcctggtgaacagggcgaaaccccgcatctactgaaaatacaaaaattagccgggcgtggtggcaggcgcctgtagtcccagctacttggaaggctgaggcaggagaatagcttgaacctgggaggtggaggttgccgtgagctgagattgagccactgcactctagcctgggcaacagagggagactccatctaaaaacaaacaaacaaaaaacaaagaaaacaagaatcagccttgaaagggtcttcagagaatatgtggaccagccctgctgttttagggctggggaggcccagcgagacgcagtgacttgcttcagatcacacagcgagctgggggtgagcacggagatttcctgtccacagtttgtggtgggggttgcagacacctcagtacaaatccccactcttgggtggagggctgggactgagagtgggtgggtggggcagggaagaagtgacaggtgtcataagttgctaaggagagccagacaggaagtggacagcaaactaggaaagcagtattgggggaggacagccaaggctaggctgtccctccctgggcaaggtgcaagtccacaggtgattagggtgtggctctgagtgagaagtcctaagaagaaggacaagttcccatctgggggaggagaggaggagacagcaacagaaacacttgattttaggttttctgagccttagcttcctcatctttttttttttttttttttttgacagggtcacgctctgtcccccaggctagagtgcagtagcacaatcatagctcactgcagcctcgaactcctaagctcaagccatcctcctgcctcagcctcccaagtagctgggactatagtcgtgtaccaccaaacctggataatttttaaattttttgtagaggtggggtctcactatgctgcccaggctggtcttgaactcctggcctccagtgatcctctggtcttagcctcccaaagtgttgggactacagatgtgagccattgcactccacccctcatctttgaaatgaagctgaaaagcccatctcatagggtagttgggaggtgtaatagaaaaaaaaaagcattgggcatgtatagtacctgacacacagcaggccctcaagaaaggcagttttttgtttttgtttagttttgagacagagtctcgctctgtcacccaggctggagtgcagtggcacgatcttggctcactgcaacctccagctcctgggttcaagcgattctcctacctctgcctcccaagtagctgggattacaggcttgcaccaccatgccccgctaatttttttgtatttttagtagagatggggtttaaccatgttggccaggctggtctccaactactgacctcaggtaatctcccacctcagcctcccaaagtgctgggattacaggcgtgagccaccacgcccagctgacagttttctttctccctgtctcccttccggtctgggcaaggaggaaagagaggaaagaatcatccattccttagcaagaagtgactgtgggcagaggccaggtcatgtctcagaactgccgacgtcagaagacaccactcccatagagaccatcctgcctagcccttccccctggggcacagagcagagaacccacttgctcgaggccatactgcctgggccgctgcaggcctgggttcatcagaggtctccaagtcctgttacactgtggcttcccctctgcaggaaagtttattttactgggtttgttttggagggtggtgggtaagatggaaacagaaaccaagcaacgggtccccagcccagctgcgaggccgtgcctgaccagccgactggccaaggtgaaggatacacatctctcatggcttccagggtggacgcccgcagaatgtctcggatgccgatgacattctcatggcggaagcgcagcaggatctggatctcccggagcgtgcgctggcagtaggtctgatgttcgaaggggctgatcttcttgatggccacgcgagtcttgcgcacgtggtcataggccgagctgaggggaccggagagaggctgctgctgtggccttacaaagggggagtccgggcctggtggccccacccaggccttggcagggaggggagagagcaggagctggctctggtcaaatcataaacaatgctggttccttcctgctgtggaggcctgggatctccagagagaaagctggggaccagccaggcggcccttcggtgactttacaaacagaggaagagactgaccgctcactgacttcccctctcctcaatccccttccattctactggccctgaacccttcgcccccattcccaggaaaggctccttaacccaagacaggtccgggggtgcagatgctggggacacaccatggggcaaatactgggaaggtggcagccaggggaggggcaggagagaatggacagggcaggggagggtcccagggtgagggatccgggcagcggggctgtcccagagggatagaggcccagagcacacggtggggccgggggcactcacagacccctcccaaaacatgcaggtggcactcctggccgcctcatctctctctgggcccctggggtggtggggccaaagccctgccccaccctgatctcggctcttctcccccaggctccctggcactgcctcacagggggaatccaagacaccctttcccccaaaacgggccctccactgcctcttcactaaggatgtcgcctccccgagagtactcatcctctgggcctcgccccgtgtcactagggtccccgcgggcccccacatgcactcggatgcccctcccatcattacagaagggtggactcaaagcctccaagcctgctcccctgaggacgtaggcagcgccccctcccccagaaagcactcaggggccccctccctgggacgctcccgatcatcccgagtctcctgcctcctcgggacgctccgcgtctccacgtcccggaaagcgctcggcgcctcctcctcctctcccgcgaagccccctcccctgagggcaccccctcccccggaacgccccctcacctgaccatgccgtacgcgccctcgccgatgtactgcaactgcgtgtagcgcgggcccacgtcgaacggctgccccttcaccatctccacctcccccgggacccccgggccgaccccctcggttctacggggctccccgcccccgcccccctgagccgccgccgccgccatctccactcctcccctcccaccgccctcctccccacggcggccccgcccgaggccccgccccttcccgcctgcctgtcacccgcagggccgcgcgcgccaggccccgcccttgccccggccccgcgtgggcctggagctgtcacgtgacccgccccgcgcgcgcccgcccttcttgccccaggttcgggggccatgggtccctgcgggctccgcggcctccaggtcaccgggaggttcggcagcgccgcctcggagactgtcctcaccctcccctcgatggcgaagcggccagggcgtgacctaccagagccacccagccaatgtatgcggcagcccaccagaacctgggcccgggatcaccctaggttaaaaataatgttctaataaatggatcaaattttacagatggagaatctgagagttaggtttactaacttgggtaaggtcactagtagtgacagctgagactcaaaatggtgtcttctgacacagagactctttctaattccatgcctctcagagtcctagactgtttttattttattatagagacagggtctctctctgtcgtccaggctggagtgtagtggtgcaataattgctcactgcagcctcaacctccctggggtcaagtgatcctcccacctcagcctcccaaagagctgggactacgagtgcgcgccaccacgccctgctaattaaaaaaaaaaattggggggctgggcacggtggctcacgcctgtaatcccagcactttgggaggccgaggtgggcagatcacctgagtttgagaccagcctgaccaacatggtgaaaccccgtctctactaaaaatacaaaaattagctgggcatggtggcacgtgcctgtaatccaagctacttgggagactgaggcaggagaatcgcttgaacccgagaggaggaggttgcagtgagctgagattgcaccacttcactccagcctgggcgacagagcaacactccgtctcaaaaacaaaaaacaaaaagaagaagagaaaaagtagggttgcagaaggtagggactgaagaaaggcatgaaggagaaggatcggggtgagctgaggcataaaggcagaagcataacttgtccagcatggctgcagtaaaaaaatgatgaggtttcagcctggagaggtaggttggggccagattaggaaggctctggattctggcaaggagtttggatgttactcagtaagcagtaaaaaccctagagggacttttgccagatcattttgcaactgcgggagaatatagtgactcagagaaaacactatggagttcagcatggagccaggtttgctgagtgggagtgagtttcccagcataggaaaggctggtgtatcagagctgcaagctgccacctcctgctgctggaagctcagttagagtgtgactgagattcccctctagtgactgaggttggcatttccttggaggactggactgggatttgttctggttcatagacgcatattcaactaatgtagacttaccatctcttctgtgccaggcacttttggtttttttttgtttgtttgtttgtttgtttttttgagacggagtcttgctctatcacccaggcaggagtgcaagctcactgcaacccctacctcctgggttcaagtcattctcccacctcagcctcccaagtagctaggattacaggcgccagccaccacgcccggctaatttttgtatttttagtagagacgaggtttcaccatgttggccaggctggtctcaaactcttgacctcaggtgatccacccacattggcctcccagagtgctgagattacggcacctggcttgccaggcacttttatgtacactacctcctgtaatcctcacagcagccatatgaagtagatactattaacatttaactggaaaatgatgctggctggtcgtggtggctcacctctgtgattccagcactttgggaggctgaggcaggctgattgcttgaccccagcagctggagaccagcctgggcaacatagtgagatcccatctctaccaaaaatacaaaaatgagctgggtgtggtggcatgcgtccgtaatcccagctacttgggaggctgaggcaggaggatcagttgagcccaggatgttgaggttgcagtgagctctgatggtgccactgcactccagcctgggtgacagagtgagagaccctgcccccacccccacccccccaaaaaaagggacagagggaaaacgatgtggaagcttacgctctgtcacccaggctggagtgcagtggcgcgatctcagctcactgcaagctccgcctcccaggttcacgccattctcctgcctcagcctcctgagtagctgggactgcagacacccgccaccatgcctggctaattttttgtatttttagtagagacggggtttcaccgtgttagccaggatggtctccatctcctgacctcatgatccacctgcctcggcctcccaaagtgctaggagtacaggcgtgagccactgtgcccggcagaattatttttctagcacagggtcttgctctgttgcccaggctggagtggagtgtagtggcaagatcataggtcactgcaggctcgaactcttaggctcaacagatcctgccaccatgcctagcacacacaaccacgcctagctaattttttttttttgtttttgaaacggagtcttgctctgttgcccaggctggagtgcaatggtgcaatctcagttcactgcaacctctgcctcccgggtctcctgcctcagcctcctgagtaggtggaactacatgcgtgtgccaccatgcctggctaattttttgtatttttattagagagggggtttcaccgtgttagccaggatggtctctatctcccgacctcgtgatccgcccgtgtcggcctcccaaagtgctgagattacaggtgtgagccactgcgcccagcatttttttttttttttttgagatggagtctccctctgtgcccaggctggaatgcaatggcacaatctcggctcaccttgacctctacttcccaggtcaagcgattctcctgcctcagccttacaagtagctgggattaccggcacacgtcaccacgcctggctaatttttatatatttagtaaagatggggtttcaccatgttggccacgcaggtttcaaactcctgacctcaagtgatctgcccactttggcctcccaaagtgctgggattacaggtgtgagccaccgtgcctggcttggctaatttttagaatgtttgtagagaagggttctagctaatgttgcccagtctggtctcaaatttctaggctcaagtgatcctctcacctcggcctttcggagtgctaggattacagtcatgagccacttcggctggctccagattaaatcttaaaccagttattagctttttgtgattttcaaggtctggcacttctttttttctttctttctttctttttttttttttttgaggcagtgtcatgctgtgtcgcccaggctggactgcagtggtgcggtcatggctcactgcaacctctgcctctcaggctcaaatgatcctctcacctcaaccttctgagtagctgggaccacaagcatgtgtcaccatgcccagctaattttagtatttttggtagagatggggtttcaccgtgttgcccaggctggtctcaaatgatccgcccaccttggcctcccaaagtgctgggattacaggcatgagccaccatgcctggcctgaaatagttatttattcttcttattattagtagtagtattctggtctttcatgaccgtagacttttgaagattataggtcagttattttgtagaatgtccctcagtttgggtttgtctgatatttccttgtgattctcatgtcactttgcctttactattgtattgtatcgagacgaggttcaccatgttacccaggctagtcttgaactcctggtctcaagagatctgcccaccttggcctcccatcatgctgggattacaggtacaggtgtgagccactgcgcctggcctttcttttcatttcatttctttccttttttttgagacagggtctcgctctgttgcccaggctagagtgcagtggcatgatcacagctcactgcagtctcaacctcccaggctcaaatgatctcccttcctcagcctcccaagtagctggcactacaggtacacaataccacatctggctaattctttttgtatttttattaggatgggtttcaccatgttggccaggctggtctcaaactcctgacctcaagtgatccacctgccttggcctcccaaagtgctaggattacaggtgacagccactgcgcctggcctaattttttaaattttttgtagacacgacagtctggctatactgcccaggctggttcttttttttccccctgagtcagagtcttgccctgtcacccaggctggagagcagtggctcgatctcaactcactgcaacctccacctcctgggttcaagcaattctcctgcctcagcctctcgagtagctgggattacaggtgcccgccaccacgcctggctaatttttgtatttttagtagagatggggtttcaccatgttggccaggctggtcttgaactcctgacctcgtgatctgcccgcctcggcctcccaaagtgctgggattacaggcatgagccactgcgcccggccccaggctggtcttaactaggttcctttctgtctgtctccttcctcctcagatatgcctaaaacatggccctgatgaggttgtagtaggcaggaatctttcagtaacaagtcttcaaagacccaactcaaaaggactcaagcaagaaaggaggtgcattggcttactgactgtgaagacacagttggctccactgactcaaacagtatcattaggactttgatccctcccttagctcaactttcttctgagttggttccattcttagccaccccctcctctcagagtagccagatggaagctagtacttgcagattcgtgtctggttttttcagtaactccagcaagggaaagctcttctctctctgtctctctttctccctgtctctgtctcttgtaatgcaaggcctagatttgactcttattggttactagtttttttgagacagagtctccctctgtcacccaggctggagtgcaatggtgcgatcttggttcactgcaacctccaccttctgggttcgagagattttcctgtttcagcctcccgagtagctgggattacaggcgcccgccaccacgcccggctaatttttgtatttttagtagagacggggtttggccatgtgggccatgctggtctcaaattcctggcctcaagcgatccactcacctcagcctctgaaagtgctttgataacaggcatgagccaccgtgcctggccagttactagttttgtttgaagcctgtgcaaatccttcaacctgaatcagtgtggaattgggggtttagttatctctactggcatgacataaagtaggctagggaagggatggttttcccaaggaaaattcgggcaccatccccagaaagtgctgagcagacagttacagcagtgtctattataatatatatatttttaattcctccccccacctttttttttttgaggcaaggtctcgctctgtcccccaggctggagtgcagtggcaccatcatggctcactgtagactcgaccacccaggctcaggcagttctctagcttcagcctcccaagtagctagaactacaggcacacaacaccatgtccagctaatttttgtatgtatatatatatatatatatattttttttttttgtagagatggggttttggcatgttgcccaggctggtctcaagctcctgggcttgagaccagtcctccccaccagcctcccaaagtgctgggattacaggtgtgagccactgctcctggcctaattcctctcattaactaccaaatgaagtccaccacccctggctaattttaaaaaattatttaggagataggggtctctccatgttgctcaggctggtctcgaactcctggcctcaagcaatcctcttgtttcaccctcccaagtagctgggattatagatgcaagccaccatgttcagtttagattgtacaatttcttttctttttttcttttcttttttttttttgtttgagatggagttttgttcttgttgcacaggctggagtgcaatggcacgatcttagcttatggcaacctctggctcccgggttcaagtaattctcctgcttcagcctcccgagtagctgggattacaggtatgcaccaccacgcccggctaattttttgtattttgttttagtagagacggggtttcttcacgttggtcaggctgttcttgaactcccgacctcagctgatcctcccgcttcagcctcccaaagtgctgggattacaggcgtgagccactgcgcccggctagatcgtacaatatcttgaaggccattatgctggtgtcttccctttgaagccctcttatattttgttggtgcaaaagtaattatggggtgggcatggtggctcacacccataatcccagcactttgggaggccaaagaggggtggattacttgaagtcaggagttcaagaccagtcttaccaatgtggtgaaaccctgtctctactaaaaatacaaaattagctgggaagactagtttcctagacggggtttcaccatgttgtccaggccgatctcgaactcctgaccttgtgatccgcccacctcagcctcccaaagtgctgggattacagccagccaccgcgagccaccgcgcctggccttattttttattttatcttttttagagacaggatcttgttctgtcacctaggctggagtgcagtggcctgatcatagctcactgcagcctcgaactcttgggtttaagtgatcctcccacctcagcctcctgagtagctaggactacaggcacacatacaccacccctggtggtgtgtgcctgtagtcccaaaccagtctgaaaagatagatgtgggggccaggcgcagtggtgatgcgcgtctgtagtcccagctacaggactgaggcaggagaattccttgagcctaggatttttgttttgttttgtttttttgagacagaatctcgctctgtcgcccaggctggagtgcagtggtaagatctctcagctcactgcaagctccacctcccaggttcacgctattctcctgcctcagtctcccgagtagctgggattacagacgcctgccaccacgcccggctaatgttttgtatttgtagtagagacggggtttcaccgtgttagccaggatggtctcggtctcctgacctcatgatccgcctgctttggcctcccaaagtgctggtattacaggcgtgagccaccgcgcctggcatgagcctaggagttcaaggctgcagtgagctgtgattgtgccactgcacttcagcctgagcgatagagcaagacctacaaaaaacaaacaaaacccaaaacagaatcacatgtaacacacagctgtggactgattggttgacaaaagtgtggtgatcagaggctggcaggaacttcaccatgtatttccgctagaagcaatgttcagtattctctaattcattgtttgtggtgactttggggaatataaccaccacagagacaagaatcaactttgaatgtgtcatcccaccacctgctggcttccgttgtttctgatgagaaatcaactgtcaatctcattggagtttccttgtacgcgatgagttgtttttctcttgctgctgccaagagtctctttttgtcttgtttgtttatttatttatttatctaatttatttattttgagatggagtttcacttttgttgcccaggctgagtgcaatggcacaatctcaactcactgcaacctctgcctcccgggttcaagcaattctcctgcctcagcctcctgagtagccaggactacaggtgtgcgccaccatgcccagctaatatttgtatttttttttttaaattttttgagatggagtctcactctgtcccccaggctagagtgcagtggcgtgatcgtggctcactgcaaactctgcttccctggttcaagcgattctcctgcctcagtagctaggattacaggcacatgccaccacacctggctaattttttatttttagtagaggcagggtttcaccatgttggccaggctggtcacgaactcctgacctcaggtgatccatccaccttggcctcccaaagtgctgggattacaggtgtgaaccgctgtgcccagcctaatttttgtatttttggtagagtggagtttcactatgttggccaggctggtctcgaactcctgacctcaggtgatccacctgcctcggcctcccaagggttgggattacaggtgtgagccaccatgcctggcccttggggtctctttttttatgaactgtctgtcccactgggcaaagcctctgagaccctattttggacactggtggagcagtagcctctggttttcgtggcttgcccctcctggcatgggatctctgttccacaagcaagctgggaggagtgtgattatggtcccagtattcttggactgtcactgatggtacagccttcattctatggtgtgggcgagtgctgggtggaggagaagagtgccctacttctttaccacgttcaccagaaatgtagcctcttcaatttggagttggaggggatgaaaactggtggcagcatgctcctcctggtgagatatggtaagccttgattggcagctgaggggagagggagcttgtcttcttggccacatctactcagagagcagtttccttccagctgaactgtggggggagggcagtcaggagatagttggtcctcctggcttaaatgccacagatggcctggcacagtggctcataatgttacaggtagttaaacaggcatgagcagggctggagagggctcttccccacccaccaggaatgtcaagtgatggttcaacaatgatcacattgcctctctaaataatttggcagccagcgccagagagagagacaagctcctgatggtccacagctgttatgttagagtgttaattgaatgcagacaccagggagaagcaatttcctggacatgtgcattaagagacaaaatagtctgggcacggtggctcacacctgtaatcccagcaatttgggagactgaggcgagcggatcacctgaggtcaggagttcaagaccagtctggccaatgtggtgaaacccccatctctactaaaaatacaaaattagccaagcgtggtgttgggtgcctgatatcccacctactcaggagactgaaggaggagaattgcttgaacccaggaggtggaggttgcagtgagctgagatcaggccactacactccagcctgggaaacaagagtgaaactgtctcaaaaaaaaaacaaacaaacaaaaaagaaagagacaaaatgatggagcatgaccttccggggtcagaccaccggaaaagggaagaaaacctcagataggcatgcatacaacttcctacacacactgtgcatgctcaccttcccagggtaaggaggccactgtgcatgcaggcagcccatcctaagggaagaatcatgggaaaggagccagcctataaagtcctaggatcaaggttgaacaccacgcttgaccttggtgcccacttgagtctcttccaaatgtacttacctttctttcccattctaaagccatttaaaataaacttccactcctgctctgaaacttcccttggtctctttttctgccttatgccctgtggttctttcttctgtggaggcaagaattgaggttgctgcagacccgtacagatttgtcaccggtaacttggataacctttcaccgataacaatgcttataatcccagcactttgggaggccgaggtggcaggatagcttgagcccaggaatttgagaccagcttgtgcaacatagtgaaaccccatctctacaaaataataataataaaagtaataaaattcaatgccacagattctccctgttcttactgagttttagtagattttcttgaataagaaagtgagccaagattgcaccactgcactccagcctgggcaacagagcaagactccatctcaataaaaaataaaattaaatgtttattcatctgttatatgacattaggataattccagaaactttaagtgtttatttatttttaaatggttttcaccagctttgcttgttttgctggggaaaagatcctcagagctccggcactgtcatcttagagctttgatgtcccccagtgtattaatccattcttgtattgctataaatacctaagcctggataatttataaaggcaagaggtttaattggctcatggttctgcaggttgtacagggaacatgatgctggcatctgcttggcttctggggaggcctcaggaaacttacaatcatggcagaaggtgaagggagaacaggcatgtcacatggcaggagcaggagcaagagagcaagggaagaggcgccacacactttacttattttatttttattcatttattttgagatggaatctcactttgtcacccaggctggagtgcagtggcactacctcagctcactgcagcctccatctcttggattcaagtgattcttttgcctcagcctcctgagtagttgggactacaggcatgcgccaccactggctttttttttttttttttttttttttagacagagttttgctcccgttgctcaggctagagtgcaatggcaccatcttggctcaccgcaacctccatctcccaggttcaagcgattctcccacctcagctgccaagtagctgggattacaggcatgcgccaccacatccggctaattttgtatttttagtagagacggggtttctccatgttggtcaggctggtatcgaactcttgatctcaggtgatctgcccgcctcggcctcccaaagggctaggattacaggcgcgagccaccgtgcctggccaatttttttttttttttttttagatggagtttcgctctcgttgcctaggctggagtgcaatggtgccatctcggctcactgcaacctccgcctcctgggttcaagcaattctcctgcctcagcctccctagtagctgggattacaggcatgcgccacctcgcctggctaattttgtatttttagtagagatggggtttctccatgttggtcaagctggtctcgaactcctgacctcaggtgatccacctgcctcggcctcctaaatagctgggattacaggcgtgagccaccacatctggcctaatttttgtatttttagtagagacgggcgtttcaccatgttgcccaggctggtctcgaactcctggcctcaagtgatctacccacctcggcctcccaaagtgctgggattacaggtgtgagccactgcgacccgccttcacacacttttaaacaaccagatctcttgagtactcactcactgtcaagagaacagcaccaaagggatggcgctaaaccattcatgagaaaccccacccccatgatccaatcacctcccaccaggccctacctccaacactggggattgcaatacgacatgagatttgggtgggcacacagttctaaaccacatccctcagcttttcctttcaggcttttgggttagtctattgcttgctccaacacctgtctactacttcagacagtctcaaagttaaaaatcctacctgttatccaatgaagtctccctgaaaaaaaatcttgcctgtaaatgtttctgatgaatgcctcctggggagagggccttttgcactgggccagctccagtgaggtcacatacagatggacttgcaagtggagtcttctagggaacctcaagacagctccagtaatgacagttctttggaaacacaactttgaaagaactccagctccgttttactccctcagggggctgccaggttgctctgagaatgtgggctgttattttttaaggttgcaacagagctggaggctgtgggctgggactagggcaatttttttttactttatttatgttacctttcttttttgagacagggtcttgctctgtcgcccaggctggagtgcagtggcacgatctcttctcactgcagtctccacctcctgggttcaagtggttcttctgcctcagcctcacaagtagctgggattacaggtgcacaccaccacgcctggctaacttttgtattttttggtagagatggggtttcaccatgttggccaggctggtttcaaactcctgacctcaagtgatccacctgcctcggcctcccaaagtgctgggattacaggcgctcaagccaccttgcccagccactttttaaaatttcttgaaagccacaacaagatttgcctatccccggtactttccccatttttaaaaatttctcaaaggtggtcttcagtggttccaaaactttatcttagaaactttcagcattttgaggggtggactgcatccaaatctggggtcttgaacatttcagttgagttagtgtcctattatcattctccacttctttggggcttcaatttccactgaagtgtggacctaaaagcattttaatcttgagtgtcattctctttacagaaaacacaggctgggcactgtggctcacgcctgtaatcctagtactttgggaggctgaggcaggcggatcacgaagtcaagagattgagaccatcctggacaacatggtgaaaccctgcctctactaaaaatacaaaaattagctgggcgtagtggcacacgcctgtagtcccaactactcgggaggctgaaacaggagaattgcttgaaaccaggaggcagagaggttgcagtgagccgagatcatgccactgcactccagcctggcgacagagcaaaaatccatctcaaaaaaaaaaaaaaaaaaaaagagagagagagagaaaacacaaaccaggcttgacacagtggctcattcctgtaatcccaggactttaggaggctgagacgggtgaatccttgagcccaggagttttttcttttctttttctttctttttttttttttttttttttttttttttttttttttttgagacggagtctcactctgtcgcccaggctggagtgcagtggtgtgatctcggctcactgcaacctccgcctcctgggttcaagcaattctcctgcctcagcctcccgagtagctgggactacaagcgcatgccaccacgcccagctaatttttttgtatttttagtagagacgaggtttcaccatgttagccaggatggtcttgatctcctgacctcatgatccgctcgcctcggcctcccaaagtgctgggattacaggtgtgagccaccacacccagccaagtttttttcttttcttttctttctttcttttttttttttttttcctaagacggagtctcattctgtcgcccaggctggagtgtaatggtgggaactcaactcactgaggcctctgtctgctaaattcaagcaattctcgtgcttcagcctcccgagtagctgggattataggtgcgtgccaccacgcccggctaatttttgtatgtagagacggggtttcaccctgttggctaggctggttgaactcctgacctcaagtgatctgctcacttcggcttcccaaagtgctgggattacaggcgtgagccactgtgccaggccgagccaagagttcaaaactagcctgggcaacataggaagactccagctctataaataaataaataagctgagcatggcagtgcatgcctgtagtcccagctacttgggaggctgaagtgggaggatccctggagcctggaaggtggaggctgcagtgagctatgattgcaccactgcgctccagcctggggaacagagtgagagagcctgtctcaaaaaaaaaaaagaaaaaagaaagaaaaaagaaaaaagagaaactaaatgaaagtggagagcttctgcttcctcttggtcatctgttcgtattacaacatctaccctaagcaatgggcctatttcttcctttttcttgatccagatatagctatcaaagccctttttgttgtctatagcatgttttgtaatctcagctcattccgagttacagccatcccgacactgttctcataggtttatgctcagcttttgtgtttatccctgggttacgcggctcttcttacatcttcttttattacagaacttcctgtgcagccgctttggctcctataaatgctattccgattgcctcttcatcaggacccaaaagggatgaaggagtggctggttttttggggaggcgggaggaggttggatattcttgaaatgataaataaaatgatacatattagttcagtattggaacacagataaatatttagcacatgcaatgagataattgttcattaatttagcatcctatgattaatttagcatcctaatagtcataggcattgtcttgttcacctcaagtacattaatacacaattacatactgctttttcccttagctttcatttatttacgactgtgtggtaaacgatcctaaaatttagtggcatgaaacaaccaccttttaaaattttttttcaaatgctcgttgattctgtgggtggagtttgggaagggcaaagtgggaaaagctatactctgctctgtgatgtctgagcctcagcctcagatggggtgacccgaacagccaacagtaactctaatggatggggagggaacagccggggctggggatctgcttcgcagatggctgctttagtcacatgcctgttgcctgcgctgcagtggcaggagggtaggctcaggcccaaaggggactgaaaaccacgcagcctgtgtgtaagggggcaacccgtatgcgaaagcacagttggactttttttttttttttttttttgagacaagagtctcactctgtcaccctggctggagtgcagtggtgtgatctcaactcactgcaacctctgcctcctgggttcaagtgattctcctgcctcagcctccgagtagctgccattacaggctcccaccaccacacctggctaatttttgtatttttagtagagatggggtttcaccatgttggccatgatggtctcgaactcctgccctcagaggatccacctgccaaagtgctgggattataggtgtgagccaccatgccaggccttttcttttctttttttctgaggcagggtctcagtctgtcacccaggctggagggcagtggtgcaatctcagctcactgcagtctctacctcctgggctccagcaatcctcccatctcagcctctcaactacaggtgtgcgccactatgcctgtctaactttttttttttttttttttttttgagaaagaatttcgctctccttgcccaggctagagtgcaatggcgtgatctcggcttactgcaacctctgcctcccaggttcaagtgtttctcctgcttcagcttctgagtagctgggattacaggcatgcaccaccatgcctggctaattttgtatttttagtagagacggggtttctccatattggccaggatggtctcaaactcctgacctcaggtgatccgcccgcctcggccttctggctaatttttttacagattttttgtggagactcagtacattgcccaggccggtctggaacttgtgggctcaagtcatcctcccacttatgcctcccaaagttctgggattacaggtgtcagccactgcacctggccggccggccttccttccttccttccttctttccttcctttcctttctttttttgttgagacggagtctcgctctgtcacccaggctggagtgcagtggtgcaatctcagctcactgcaacctctgcctcctaggttcaagcaattttcctgcctcagcctcccaagtagctgggattacaggcgtgcgccactgcgccagctgatttttgtattttcagtagagacagggtttcaccatgttggccaggctggtctcgaactcctgacctcaagtgatctgcccacctcagcctccaaagtgctgggattacaggcatgaatcacggcacctggcctcctggcttttctttttctttgagacaaggtctcactctgtctcccaggctggagtgcagtggtgtgatcattgctcactgcagccttgaactcctgggctgaagcaatcctcccatttcagcccctcaagtggctaggagtacaggtgcatgccaccatatccagctaattttttcaattttttgtaaagatggagtcttatcatgttgcccaggcttgtcttgaactcctgggctcaagtgatcctcccgcctcggcctcccaaagtgctgggattataggcatgagccgctgaagctgggctctataggcgtattatgaaaaaccagggctccttcatgacccatttcctgttccccagaggcaagaacgttccaccgctttggctgggccattggtattgacttccatgtctctaaacagcatgttcatattgtacttgctgatttctcggttttaggcactacctgttatcattttgaaggttgaggctttacaattcttccacctctccccgacagcccacatctctattcctacatatgcacgtgtgcacttcctgttttcattcttccatgtcactgtgcctcggttctgggtacacagatattcagagtctatatcctatagctatgtaaacactgttcacagctgaaccatgccctttccacaaacacttcttccctgcactgtttgttccttctttcccctccaccacactgagttcattatgtcacattttagctgctgtgtttttttgctatgtaacactagttcaatcctgaatgctaccttgagatgtcaatcctttatcacattcaaacatattccattttctattggttttatttcatattattttgttttgttttattttgagatagggtcttgctctgtaccggaggctggagtgcagtggtgcaatcacagctcactgcagcttcagcttcctgggctccaagcagtcctcccacctcagcccccagaatagctgggactacacatgcgtgccactacacccgactaatttttaaattttttgtagagacagggtcttgcaatgttgcccaggctggtcttgaattcctgagctcaagtgatcttcctgcctcagcctcccaatgtgctgggattactggcatcagccacctcgcccagctgcaccatgtatgcatttctaaacaggcttagttcctgcctgttttgggctttataagaacgcactcatggccagacacagtggctcacgcctgtaatcccagcactttcagaggccaaggtggatggatcatgaggtcagaagttcgagaccagcctggccaacatagtgaaaccctgtctctactaaaaatacaaaaattagccgggcatggtcttgcacgcctgtagtcccagctactctggaggctgaggcaggagaatcacttgaacccgggaggcagaggttgtggtgagccgagattgtgccactgcactccagcctgggcaacagagctagactctgtctcaaaaaaaagaatgcactcattgtaggctgggtgtggtagctcacgcctgcacgcctgtaatcccacactttgggaggctgaggcgggtggatcacctgaggtcaggagttagagactagcctggccaacatagtgaaaccccatctctactaaaaatacaaaaattggccaggcgcacatctgtaatcccagcactttgggaggccaaggcaggcggatcatctgaggtcaggagtttgagaccagcctgaccaacatggagaaaccccgtctctactaaaagtacaaaaaattagccgggcgtgatggcacaaggctgtaatcccagctactcgggaggctgaggcaggagaattgcttaaacccagaaggtggaggttgcggtgagccgagattgcaccactgcactccagcttgggtgacagagcaagactccgtctcaaaaaaaaataaataaataaaaagttaattgtgattgtggtagaatacacacaacataaatgtacctttttttttttttttttttttgagacagagtctcgctttcttggccaggctggagtgcagtggcacgatctccactcactgcagcctccatctcccaggctcaagcaattctcctgcctcagcctcccgagtagctgggattacaggtgtgtgccaccacgtccggctaatttttgtatttgtagtagagacagggtttcaccatgctggcctggctggtctggaactcctgacctcaggtgatccacccactttggccttccaaagtgctgggattacagatgtgcgcctggccaatttttgtatttttagtagagatggggtttcaccatgttggccaggctagtctccaactcctgacctcaggtgatccacccgcctcggcctcccaaagtaccatctgagccattttttagtgttcagttcagtggtgttgagtacattcacactgtggtgcaaccaatctccagaactcttcatcttgcaaaactgaaactctgaacccactaaacaacaactcccctctctcccctcccctcagcccctggcaaccatcactctactttctatctctatgactctgactccaggtacctcacataagtggaatcatgcagtatatgtcttttggggacagggttatttcacatagtataatgtcctcaaagttcagccatgttgtagcatgtatcaaaatttcctattttaaaaaaaattctgaataatattccactgtatgtaggtagcacagtttgtttatccattcaccctttcagcctctgtctttattattattattattattttgagacagtcttgctctgttgcccagactggaatgcaatggcgagatctcagctcactgcaacctccgcctcccgggttccagtgattctcctgcctttgcctcctgagtagctgggattacaggtgcccgccaccatatgcctggctaatttttgtatatttagtagagacggggtttcaccatgttgaccaggctggtctcgaactcctgacctcatgacccgcccgcctcggcctcccaaagtgctgggattacaggtgtgagccaccgctcccgaacctgtcttctatattggatgccttcctcaaacgtggtgaatcttgggggtctgtgcatactaaagctggagctattaaaagccttttaaaagttccccaggctgagggcacagtggctcatgcctgcaatcccagcactttgggaggccaagacaggtggatctcttgagtccaggagttcaagaccagcctgggtaacataacaagacctcatcgctacaaaaaataaaaaaataaagctgaccatggtggctcacgcctgtaatctcagcactttgggaggccaaggcgggcgggtcatgaggtcaggagttcgagatctgtctggtcaacatggtgaaaccccatctccattaaaaatacaaaaattagccaggcgtggtggtggatgcctgtaatcccaactactcaggaggctgaggcaagagaatcacttgaacagggaggcagaggttgcagtgagctgagatcgtgcctctgcacttcagccggggcgacagagtaagtctccatctcaaaaaaaaataagaaaaaaaataaatcaggcacggtggtgcacacttgtagtcccagataccaggaaggctgaggtgggaggacgatcgagcccacgagtttgaggttgcagtgagctgtaattgtgctactgcactgcagcctgggtgacagagtgagacccaatctcaaaaacaaacaaacaaacaaaaaaaaaacctctctccactgtgtggcactgtgtgctagggggtgaccttgctggtggcttcccagggagctcctgatgtcagtgtcttcaggactttcctcttggcttgatcacagtcccttcagaagattcttccaattcctgcctgaaggtgccaatttctatgtcttttgtggcttctgcaaagaaaacctagcaatttctcattttttccaatgccagctcgattccacttccttggttctagtaaattggttaccatgagtccctctattagtacctggcttaaacatttttgttcgtattgtcttctttcctattcttactcttcctgtgggtgtgtggcattagaaagattctcttactgccattttattatgtttggggcaagaacagaagtaaatacatgtgtttagtctactatctttaacctgatgccttttaacttttttttttttttgaggtggagttttactcttgtcacctaggctggagtgcaatggtgtgatcttggctcactgcaacctctgcctcctgggttcaagcgattctcctgcctcagcctcccgagtagctggggttacaggcgcctgccaccatgcctggctaattttttttttttttttagtagagacagggtttcaccatgttggccaggctggtcttgaactcctggcctcaggtgatttgcccgcctcggcctcccaaggtgctgggattataagcgtgagccactgtgcctggccccttctaactttttaaaagtaaaccttgtcttggttaggcatggtggctcatgtctgtaatcacaaaattttgggaggctaaggcaggaggattgcttgaggccaggagttagagaccagcctgggcaacagagtgagactgtctctacataaaatttaaaaaaatagccaggtgtggtggtacatgcctatagtcccagtgctttgggaggccaaggcaggaggatcacttgaacctaggaattcaaggccacagtgagctgtgattgcaccactgcattccagcctgggtaacagagcaagaccctgtcttgaaggaaaaaaaaagagttgtcatattcttaccacatcattatccacattatccacaaagcaaagatatggaatcaacctaagtatctatcaatggaggagtggataaatcaactatggtatgtatacagaatggaatactatttgactataaaacagaattaggctgggcatgatggcccacacctgtaatcctagcacattgggaggcgaacacaggtggattgcttcagcccaggagttcgagaccagcatggccaacatggagaaaccccacctctactggaaaaaaaaaaaaattagccaggcgtggtggcaggtgcctataatccctgctacttcagagactgaggcaagagaattgcttgaacctgggaagcagaggttgcactgagccaagatcactgcactccagcctgggccacagagcaacactcagtctcaaaaaaaaaaaaaaaagttttaatatctgatagcagagtagggtgattatagttggctgcaatgaattgtatatttcaaagtaactagaagagaacttgaattactcccaacccataggaatgagaaatactcaaggtgatgagtaccccagataccctggcttgatcattacacattctatgcatgtaacaaatactctcatggaccccataagcatggtgtatatatatatgacatatatgatatatcatatgcaacacatattatatcatatatgatataatatatgtgatatatcatatatgatatataatatatgtgatatatcatatatcatatataatatatgcgatatatcatatatcatatataatatatgtgatatatatcacatataatatatgtgatatattatgtatcacatataatatatgtgatatattatgtatcatatataatatatgtgatatattatgtatcatatataatatatgtggtatattatgtatcatatataatatatgtggtatatgtgatatatattatatatgatatgtgtgatatattatataatatatgtgatatattatatatgtgagatatatataatatatatatttcttttttagacagcatcttgttctgttgcccaggctggagtgcaattgcacaatcttggctcactgcaacctccgcctcctggtttcaagcaattctcctgccttagcctcccgagtagctgggattacaggcgaccgccaccacacccagctaattttagtatttttaatagagatggggtttcaccatattggtcaggctggttttgaattcctgatgttaggtgatccacctgctttggcctctcaaagtgctgggattacaggtgtgagccactgcgcctggcctggaatacattatgtatcaataaaaaaaaacaggagttgtgtggagaacaattggagcagcagatggcaaagaagaccttgagggctgggataagaagactggattttctgctagaaggaatgagagcattttatcatgttagtcagcttcagagccttgcagtaaaaacatttgcacatttgaatgttgatgaagacatttacaaatatagacaggatgtgataatttgtacttttccctcatccccggttggtgtgagtgatgtcattgattgcaccagttaacaggtgaaaaaatagaagtttgggatgtcaggattgtacctgatgcttgagcatcataggtggatgtgaaggaaaaggaaaacatgatcaagggctgagcaatctgggccacaggaatatcaaactcatttaccaatgtgtgcagccacccttaggctgcatgacagattgaggacagagcttatctgggcactcattaattgaaaggaggagatcagtgagaagaagtagagaaaacaaactacttgtcagttcaaacttaatcactttgttttttgagacagagtctcgcactttcgcccaggctggagtgcagtggcatgatctcggctcactgcaagctccgcctcccgggttcatgccattctcctgcctcagcctcctgaatagctgggactacaggcacccgccaccacgcccggctaattttttgtatttttagtagagacggggtttcgccgtgttaaccaggatggtctcgatctcctgaccccgtgatcccccgacctcggcctcccaaagtgctaggattacaggtgtgagcccccgcgcccggtcttttttttttttttttttttgagacaaagtcttgctctgttgtccaggctggagtgcagtggcatgatgtcagctcactgcaacctctgcctgtggggttcaagagattctcctgcctcagcctcccaagtacctgggattataggcacccgccaccacacccgactaatttttgtatttttagtagagacagggtttcacatgttggccaggctggtctccaactcctgacctcaggtgatccacctgccttggcctcccaaagtgctgggattacaggtgtgagccaccacgtccagctttttttttttttttttgagatgtagtcttgctctgtcacccaggctggagtgcagtggctcaatctatgttcactgcaacctccgcctcctaggttcaagtgattctcctgcctcaaactcctgagtggctgggattacaggtgcgtgacaccacgcccagctaatttttgtatttttagtagagagagggttttaccatgttggccaggctggtctcaaattcctggcctcaggtgatctgcccggctcaggctcccaaagggctgcgaatccaggcgtgagccaccgtgcccggcccggtttatattttagaagggtaatacagtaagttgacagtaagagagcccttatctcttttcttttccttttttgttctcctttcatattccatcattgaaaggtaggaacatacagcataacttaaaattaggaacagagttcacatataactttttttttttttttttttgagatggagtcttgctctgtcaccaggctggagtgcagtggcgcaatcttggctcactgcaacctctgcctcccaggttcaagcaattcttctgcctcagcctcttgagtagctgggactacaggcacgtgccaccacacccagctaattttttttgtatttttagtagagacgcggtttcatcatgttggtgaggctggactcgatctcctgatcttgggatccacccgccttggcttcccaaaatgctgggattacaggcatgaaccaccacacccagccaccttttttttttttttctttttctttttgaagacagaatcttgctctgttgcccaagctggagtgcagtggcgcaatctcagctcaatgtagcccccacctcctgggttcaagtgagtctcctgcctcaggctcccgagcagctgggattacaggcatccgccatcacacctggctaatttttgtatttttagtacagacgaggtttcaccatgttggtcaggctggtctcgaactcctgacctcaagtgatccgcccgcctcagcctctcaaagtgctaggattactggtgtgagccactgcgcctggcccatataacctttttaaaaaataacagctttattggaatataaaacatacaccattaagtttaccctttcaaagtgtacagtttggtgggtttggtttttagttgattcacaaagttcatctgtcaccactatgtaattccaaaatattttcaccccaggaagaaactctatactaattggcagccactccctgtcccctccctactccccaagtccctggcaaccactaatctaattattgtctccatggatttgcctattctggacagaccacatgtaaagtttttgcttaatctgattaattgataggttccacttttacagataaatagcttttcatgtcagcaaaaatgaaagatttaaaatgtagtactaggctggtcacagtggctcacgcctgtaatcctaacactttgggaggccaagctaggtggatcacttgagctcaggcattcaacaccagcttgagcaacatggcaaaacccggtctctacaacaaatacaaaaaattagccgggtgtggtggtgcatgcctgtgctctcagctcccagctacttgggaagctgaggtgggaggatcacttgaccctgggaggcagagattgcagtgagccaagatcacactactgcattccagcctgggcaacagagtgagaccccatctcaaaaaaaaaaaaaatatatatatatatatatgtagtacctgacctcccccaaagttatttgaggttcaaatgatttatttcagcctccacttaactagagctgacctcttattagacaccttggggacattactatgagccttaaagaaataaaaagtattataaaggaatacaataaatagttgtatgccaattaattaaacaacttagaaaaatggacaaagtcctagaaaaacaagaaaaacctaccaaatttcaggaagaaatggaaattctgaatagacatataacaagtaaatagattgaagtagtaataaaaaacttcccacaggttggcgtggtggctcatgcctgtaatcccagcactttgggaggccgaggtgggcagaccacgaggtcaagagatcaagactatcctggctaacaccgtaaaaccccgtctctactaaaaaaaaattagccaggcattgtggtgggtgcctgtagtcccagctacatgggaagctgaggcaggagaatggtgtgaacccaggaggtggagcttgcagtgagatgagatcgtgccactgcactccagcctgggcaacagagcgagactccctctcgagagaaaaaacaaaaacaaaaacaaaaacttccacaaaggctcatgcccacagggcttcactgctgtatttaactaaacatttagagaaaaattaataccagtttttcataaactctttcaaaaaatagaagaagaggcaacatttcccaactctttttatgaggccagtattaccctgatgccaaagccagacataagaaaggaaactacagatcagtatttcttattaatatagaggcaaaaatcttcaaataccagcagacagaatccagcaccacatcaaaaggacagtacaccatgatcaagtgcgaatgatcccaggaatgcaaggctggttcaatatctgaaaatacattaacttaatacaccataattttagaataaatggaaaaaagcaattaatcatctcaataaatgcagaaaaaaactttgacaaaattcaacattctttcgtaagaaaaaaaccatgcaacaaactacaagtaaaagacaacttcctctacctgataaagagcatctgtgaaaaacccacagctgacatcatacttaatggtgaaagttcctgacagatcaaaataagacaaggaagtccgctcttaccacttttattctgtattgtactggagattctagccaggaaaattaagcaagaaagtgaaataaaaggcatctagattggaaagaaagaagtgaaactatctatagattacatgatcttgtatatagaaaatatacaagatccaaggccgggcgtggtggcttatgcctgtaatgccagcatttgggaggccaaagtgggcagatcatttgagatcagcagtttgagaccagcctggcaaacatggtgaaactccgtctctactaaaaatacaaaaaattagctgggcatggtggtgcacacctgtaatcccagctactcagagtctgaggcaggagaatcccttgaagctggtaggcagagtttgcagtgagctgagatcgtgccactgcactccagcctgggtgacagagtcagactctgtctcaaacaaaacaaaacaaaaacaaaaaaagaaaatatataagatcctgtaaatcctaaggaacccactaaaaaatcagaactttaatcgccagggaaatgcaaatcaaaacctctgaagaaaaaacacaaactgttttttttcttggctctcacaccacagtaacaatcactacagaagtcttctgtgaccgggctgggtgcggtggctcacatctgtaatcccagcactttgggaggccaaggtgggtggatcacgaggtcaggagttcaagaacagcctgaccaacgtggtgaaaacctatctctactaaaaacacaaaaagaatagccaggtgtggtggcaggcacctgtaatcccagctactggggaggctgaggcaggagaaatgcttgaaccagggaagcagaggttgcagtgagcagagatcacaccactgaactccagcctgggcaacagagtgagacttggtctcaaaaaaaaaagaaaagaaaaggaaaagaaaaaagaaaaaaaaaagaagtcttctgtgaccaaatgttggggggaactcctgccaacaccaagcaaacaaccaattctccaatggacaattctgaattgagtgtcctccaattcaattccaacactatctacctgaagatagcatcagatcccacaagttgagggttcaatcccacaagactgcacccctacacacaccagaacttctgaccgactggcttcaaattggggtttccatgattccctcttttttttttttttttttttttttttttgagacagagtctcctctgccacccatgctggagtgcagtggcagagatctcagctcactgcaagctccgcctcccaggttcatgccgttctcctgcctcagcctcctgagtagctgggactacaggtgcatgccacaacgcccagctaattttttgtatttttagtagagatggggtttcactgtgttagccagagatggtttcgatctcctgacctcgtgatccgtccgcctcggccttccaaagtgctggggttacaggcatgagccaccatgtctggcacagctctctctttagtgagagtggggacttctgagaggaaaagaccagcaggtgggggatgtgccatattttatagtcagatttgaggatgtggtgcctgatttacataggactcacagattggtttgatcaagagtgatattacatagcatgcagggaaggctggctgcctcaccctaatcatattatgcaaatgaactttccccttggccttcgccatcttgtctgctctttactgtacacgtggctgacaaagagaagggaagatggagccaccatcttgaacatgattggcacaactgccaacatctatgtctgcagctcgattttacaggctactcttcgttagaaaggaaaataatttggggctgcttttcattaaaaggagaaccttaccaaagacttctgtacccttactatctgcctaagtaatttcttcttaactcctgtatgacctccacatggtcagctatccggaagctccctaagccctgtccttttggccttttatggagacttaattggataggcatgactcaagcatggacaaatgtgtagaaaggtgattggtcaaaaagggcacgatctaatactaataccctgaatggggaaccccagcaaggcccttgtgttcagcaactccttggcctctctgtgcagctttccttcctccagggtatgggcaggagtcctaccgaaatgaaggtgtcatcaactacactcagacaaggtatgtcagagagtttctttatggccaatttcaatacagaaaggtaggggaagattcctgccttggtgagaaaaagaagcaggtgaaaggagagcaggagaaggtcaaacagagagagagagtttttttttttttttttgagacggattcttgctctgttgctcaggctagagtgcagtgatctccgctcacactaacctccgcctcccaggttcaagcgattctcctgcttcagcctcctaactgggactacaggcgcccgccaccacacctggctaatttttgtatttgtagtaaagacggggtttcaccatgttggccaggctggtcttgaactcccgacctcgtgattcacccaccttggcctcccaaagagctgggattacaggcatgagccaccacacccagccaagagattcttttttcaatgaggcctgcttcagaggattgcagcactccagcattctagcaagagctatgggagctgtgaaccaggaactgtggacaaaatctagatgtatatatatatatatcaccaaatcacaatgaggtgctgcctcatacctgttacgatggccactatagaaaacaaaaacaaaaaacaccaaaaccagaaaatacgtgtggcaagaatgagagcgaattggaaaccccgtgcactgttggtgggaatgtaaaatggtacagctaatgtggaaaactgtgtgaaagttcctcaaaatattaaaaatagaactaccatatgatccagcagtcccacttttgggtatttatttatttatttatttatttatttatttatttatttttgagacggagcttcgctcttgtcacccagaatggagtacaatggtgcgatcttggctcacaggaacctccgcctcctgggttcatgcgattcttgtgccttggtctctcaagcagctgggactacaggggtgtgctatcacgtccagctaatttgtgtgtgtgtgtgtgtgtgtgtgtgtgtctgtgtatgttttttgagacagagtctcactctgtcgcccaggctggagtgcagtggtgtgatcttggctcattacaacctccatcttccgggttcaagtgattctcctgcctcagcctcctgagtagctgggattacaggcatctgccaccatgcagactaatttttatatttttagtagagacggggtttcaccatgttggccaagctggtctcaaactcctgacctcaggtcatccacccacctcagcctcccaaagtgctgggattacaggcatgagccatgtgcccggcctaatttttgtgttttcagtagagacagggtttcaccatgtcagccaggctggtcttgaactcctgacctcaagtgatccacacacctcagcctcccaaagtgctgggattacaggcatgagccacgtgcccggcctaatttttgtgttttcagtagagacagggtttcaccatgtcagccaggctggtcttgaactcctgacctcaagtgatccacccacctcggcctcccaaagtgctggaattacaggtgtgagccactgcgcctggccacttctgggtatttatccaaaagaattgaaatcagaatctcaaagagatatctgcattcccatgttcatttcagtattatttacaataatcaagaggtgtacacaacctaaatgtccactaacagatgaatggataaagaaaatgtgaggccaaggtgggcggatcacgaggtcaggagattgagaccatcctggctaacacggtgaaaccccatctctactaaaaatacaaaaaattagccaggtgtggtggcgggcgcctgtagtcccagctactcaggaggctgaggcaggagaatggcgtgaacccgggaggtggagcttgcagtgagctgagattgcgccactgcgctccagcctgggtgatggagcaagattccatctcaaaaaaaaagaaagaaagaaagaaagaaaatgtggcacagacatacaatggaatattattcagctgtaaaaaggaggaaatcttgtcatatgctacaacacagatgaaccctgaagactgatacagtttcgatgtgtgtctctgcccaaatctcttgtagaaatgcaatccccaatgttggaggtggggcctgtggggaagtgtttggatcacgggggcagatccctcataaatggcttgcgccatctccttagcaataagtgagcccttactctgagttcacacgagatctgactctttaaaagttagtggcacccctcctcaccctctcgctgtcttgctcctgttttcgccatgacatgcctgctccccattcgccttctgccatgattttaagtttcctggggcctccccagaagccaagcagatgccagcaccatgcttcctgtacagcctgcagaaccatgagccaattaaacctcttttcaccgtaaattacccagtctccggcatttctttatagcaaagcaagaatggcttaagacaaagacattatactaagtgaaataaaccagttatagaaggacaaaaactgcatgattccactcatacgaggtatctaaagtagtcaaactcaccaaaacaaaaattagaaaggtgatgttcagcagctgaggggagggggagaggaggagttgctgtttattgggtatcgagtttcagtcatgcaaaatgaaaaattttagaatctgctgcactacgttgtgatcgtagtttaaagtactgtacacttaaaacttgctcgggtccaggtgtggtagctcatgcctgtaatcccagcacgttaggaggccgaggcgggcggatcacgaggtcaggagatcgagaccatcctggccaacatggcaaaaccccgtctctactaaaaaataaataaataaaaattagctggggatggttgcgtggcatggaggctgaggcaggagaattgccggaacccgggaggcagaggccacagtgagccaagatcgtgccactgccccctagcctgggcgacagagtaagactccatcaaaagcaaacaaacaaacaaaaatcaacaacaaaaacttgctaggagggtacatctcatgttatatgttttatcacaataagaaaataaaactggccaggcacagtggctcacacctgtaatcccagcactttgggaggctgagatggaaggatctcttgagcccaggagtacgagaccatcctgggcaacaccgtgaaacccccgtctcgacaaaaataaacaaaatcagctgggcatggtggtgcatgcatgtggtctcagctatttgggaggctgaagagagagaattacttgagcctgggaggttgaggctgcagtaagccaagatcgcaccactgtactcctgcctgggcaatagagatagacactgtctaaaaaaaaaaaaaaaaaaaggccaaggtcaggtgaggtggctcatgcctgtaatcctagcactttgagaggccaaggtgggtgggtcacctgaggtcaggagatggaggccagcttggccaacatggtgaaactccatctctactaaaaaaatacaaaaatgagctaggcgtggtggcacgcacctataatcccagctactgaggaggctgaggcaggagaattgcttgaacatggggtgcggaggttgcagtgagccgacatcatgccacttcactccagcctgtgtgacagagcgagactccatctgaaaaacaaaaaacaaaaaacaaactaattaatgaaaacagtaatgttgcaagatataggtcaatatgcaaaaaaaaaatcaattatatttccatataattgcaatggacaggtcaggcacgtttgctcacagctgtaatcccagcactttgggaggccaaggcgggcagatcacttgaggtcaggagttcgagaccagcctggccaacatgatgaaatcccatctctactaataatacaaaaacaaacaaacaaaaaaattagccaggcatggtggtcggcacctgcaatcccaactactagagaggctgaggcaggagaatagcttgaatctgagaggtggaggttgtggtgagccgagaatgcaccattgcactccagcctgggcgacaagagtgacatttcatctcaaaaaaaaaaaaaaaaaaaaaagccgggtgtggtggctcatgcctgtaatcccagaactttgggaggctgaggtgggtggatcacgaggtcaggagatagagaccatcctggccaacatggtgaaaccccgtctctactaaaaatacaaaaaaattagctgggtgtggtggcgcatgcctgtaatcccagctactcaggaggctgaggcaggagaatcgcttgaaccagggagttggaggttgcaatgagctgagatcgtgccactgcactccagcctggtgacagagcgagaccccgtctcaaaaaaaaaaaaaaaaatgcaatgaacaatttctgaaaacgaaattaagaaaacaattccatttacaatagcacccccaaaataaaatacttaagaataaacttaacaaaaggagtacaaaatgtatgctctgaaaccttgaaataattgttgaaacaaatcaaagaagatttgatttctaagtaaatggaaagataccccacattcatggatcagaagatttaatattgttaaattaatctacccaatccctattggaattccagtgacttccttgtagaaattgacaaatgggtcctaaaattcatatggaaactcaggggactcagaatagccaaaacaatcttgaaaaagaaacaagttgaaggctcacacttcccaatttcaaaacttactacaaagctacagtaatcaagacactgtgatactgtcatagggctagacccatagatcaatgatctatagagtccatggctggatgtggtggctcacagctataatcccagcactttgggaggctgaggtgggtggatcacttgaggtcaggagttcgagaccagcctggccaacatggtgaaaccccatctctactaaaaatacaaaaattagccaggtgtggaggtgggcacctgtagtcccagctacatgggaggctgaggcaggagaatcacttgaaccctgagtgacagactctgcctcaaaaaaaaaaaaatctagagtccagaaataaacctatatgtctgtggtcaatttattttaaataagggtgccaagacaattcaatgagggaaagaatagtctttaaataaacagtgctatgtaacagtgaacatgtacaaaacatacacatacaaaataatgaacttgactgggcatggttgctcatgcctgtaatcccagcactttgggagcccgaggtgggtggatcacttgaccccaggagtttgagactagcctgaacaacatagtgaaactcctgtcccacaaaaaatacaaaaagataagcaaggcatggtggtgtgtgcctgtagtcccaactacttaggagactgaggtgggaggatcacctgagcccaagagttcaaggctgcagtgagttgtgatcacaccactgcactccagcctgggcagcagagtaagatcctgtttcaaaaaataataaataaataaggaatgtggagcccctgcctcataccatatacaaaaattaactcaaaatagggttgttgttgttttaaaaccaaatgtaaaagctaaaactataaaactcttagaagaaaacatagggacaagtctttgtagcttcaaatttggcagtgtcttttttttttttttttgagacggagtcttgctctgttgcccaggctggagtgcagcagcacaatctcggttcactgcaagctcggcctcccaggttcacaccattctcctgcctcagcctcccgagtagctgggactacaggcgcccaccaccacacccggctaattttttgtgtatttagtagaaacggggtttcaccatgttagccaggatgttctccatctcctgacgttgtgatccgggtgcctcggcctcccaaagtgctgggattacaggcatgagccaccgcacccatcccggcagtgtcttcttagacatgtcaacaaaaaggaaagcaacaacaatgaaaacagatacattgggcttcatcaaaatgtgaaacttataacatacactggggcctgtcggggggtcgggggagcaagagcattaggataaagctaatgtattcagggcttaatacataagtgatgggttgataggtgcagcaaagcaccatggcacacgtttacctatgtaacaaacctgtacatcctgcacgtgtatcccaggatttaaaataaaatatagaaaatactcaacaatcataataagtgtaaaagaattttggtcgggcgcagtggctcacgcctgtaatcccagcactttgggaggccaaggcaggtggatcacgaggtcaggagatccagaccatcctgactaacacggcaaaaccctgtctctactaaaaatacaaaaataaaataaaataaaataaaaataaataaaaataaaaattagcggggtgtggtggctggtgcctgtagtcccagctactcaggaggctgaggcaggagaatggtgtgaacccaggaggcggagcttgcagtgagccgagatcgtgccactgcattccagactgggggacagagtgagactctgtctcaaaaaaaaaaaaaaaaaaaagaatttgaaacaaaaacgtgaaacttctgtgattcaaagaacaccgtcaagaaagtgaaaaaacgcctgcctgcccgcctttctttctctctctctctctctttctttctttcaacagtctccctctgttgccgaggctggactatactgccgtgatctcggctcgctgcaacctccctgcctcaggctcctgtgattctcctgcctcggcctgccgagtgcctgggattgcaggcatgcgccgccacgcctgactggtttttgtatttttggtggagacggggtttcgccgtgttggccgggctggtctccagctcctgaccttgagtgatctgcccgtctcagcctcctgaggtgctgggattgcagacggagtctcgctcactcaatgctcaatgttgcccaggctggagtgcagtggcgtgatctcggctcgctaaaacctccacctcccagccgcctgccttggcctcctaaagtgctaagattacagcctctgcccggccgccaccccgtctgggaagtgaggagcgcttctgcccggccgccaccccgtctgtgctgggtgtggtggtgggcgcctgtagtcccagctttttggaaggctgaggcaggagaatcgcttgaacccaggaggcggaggttgctgtgagctgagattacaccactgcactccagcctgggcgacagagcaagactccatcttaaaaaaaaaaaaaggccgggcacagtggctcacgcctctaatcccagcactttgggaggacaaggcaggtggatcacgaggtcaggagattgagatcatcctggctaacacgatgaaaccccgtctctactaaaaatacaaaaaattagccgggcctggtggcaggcacctgtagtaccagctacttgggaggctgaggcaggagaatgacgtgaacctgggaggcggagctggaagtgagccaagatcgtgccactgcactccagcctgggcgacaaagcgaaactccatctcagaaaaaaaaaaaaaaaagtaagaaaagaaaaaaagaaatgtaaaatagtaaacagaaatatctcccagctcttaaaattaggcaattctgttggaaaggacataactctgaatagaggttataaggaagagtttggatttaacaggagagtgccaagaagctcttccagtttacaaagcaggagagtatcattaagcctgtgttttagaagatgactgcattctgtgattctgaaatagctatatataggttgctcgtgaaatctgtgctgctagtcttcttttttttttttttgagacagaatcttgctctgtcccccaagctggagtgcagtggcacgatctcagctcactgcaacctccgcttcctgggttcaagcaattctcctgtcttggtctcctgagtagctgggattacaggagtgcaccaccacgcccagctaatttttgtatttttaatagagaaagggtttccctgtgttgaccaggctggtcttaaactcctgacctcaggtgatctgcccgcctcggccttccaaagtgctgggattacaggcgtgagccactgtgcccggcgtcgctagtcttctcttactgaagtgaaactcacctctattctttttttttttctttttctgtttttgagacagagtctcagtctgtcacccaggctggagtgcagtagctcgatctcggctcactgcagccttcacctcctgggttcaagtgattctcctgcctcagcctcccaagtagctgggattataggagtgcatcaccacgcccagataattttttttttgtatttttagtacaggtggggtttcaccatgttggccaggctggttttgaactcctgacctcaaatgatccaccggcctcggcctcccaaagtgctgggattacaggtgtgagccatagtacccagccagaaataaatttattgactgatataaattaaaattcctgtgtatagctggcttcaggaaagcctgaataggtgttcaaagaatgtcatcaggaacttgtctcaccaatcccttacctgtgttagcttcaattaaaaaaacatatttttgggccgggcgcagtggctcacacctgtaatcctagcactttaggaggccgaggtgggtggatcacctgagatcaggagtttgagaccagcctggccaacatgatgaaaccgtctctactaaaaacataaaaattatcgggcgtggtggtgcataaccgggcatggtggtgcatgcctgtaatctcagctactcgggaagccgagggagaattgcttgcatctgggaggcagaggttgcagtgagctgagatcgcaacattgcattccagcctgggcaacaagagtgagactccatctcaaaaaaaaaccaaaaaacaaaaacaaaaaacatttttttaagagacagtttcactctgtcgcccagagctgggtccagtagtgcaatcacagctcactctaacctcaaagtcctggactcaggcattcctcctgtcccagcctcccgagtcactgagactataggcaagcaccagcacgcctggttactttttttttttgaaacagggtctccctctgttgcctatggtggtatgcagtggtgcaatcatggttcattagagcctcaatctccgaggctcgagcaattttcccgtgtcagcctccaaagtagttgggactacaggtaagtgccacaatgtccagctaatttttttttctttttattgagacggagtctcgctctgttgcccaggctggagtgcagtggtgcaatctcggctacaacctccgcctcccgggttcaagcgattctcctgccttagcctccgaagtagctgggactacatgcgcgtgccaccacgcccggctaattttttgtatttttattagagacggggtttcaccgtgttagccaggatggtctcgatctcctgacctcatgatccacctgcctcggcctcccaaagtgctgggattacaggcatgagcctccatgcctggcctgtccagctaatttttaaattttttgttttagggatgaggtcttgctatgttgcccaggctggtcttgaaatcctggcctcaagtgattctcccctggcctcccaaagtgctgggattacagatgtgaaccactgcgcccggctgttagcttcattttcaggcagcctcttctttctgccattttgccgaccagagtcgaaagaaatctcatccctaaaagttcctgcaatggtgcttgggaagaatctcattggtctacagtaggtcataaattcttctgtaaactaatcaccatggggaagaggaggtaaggtatgttctgctcggccagggtaatagcagtgggaacagaggatggactggccaggaaataacatggtggaggcagagtatgcaagtgctcattgcttagcagtgttgggaaagaaagaggattttatctattgaatgccagccatgtgttggccactgtgctgggcaaatgcaactcattttgaaggccagacatggtgtggctcatacctgtaaccccagcactctgggaggctgaagcaggaggatcacttgaggccaggagtttgagaccatcctgggtgacacagtgagatctcatctacaaaaaatgaaaaattagctaggtccagtggctcgtgcctgtgggcccacctcctggggagactgtggcaggaggaggattgcttgagcctgggatgtcaaggctgcaatgaaccataatcacaccactgcaccccagccaaggcgacagagcaagatcctgtctcaaagaaacagacaacaactcagtctgtggaagagggggacatataaacaatgactatccaatgtaccagttacaatgattgaggtatacagcaagggccactaacacaaaacagaaaggaaagcatttgggcagtgactgtgggtcaggggagaggcagttcccagagaaggaaatcttgacttgagttttatttatttattttaatttttatatttttgagatggagtctcactctgtcacccaggctggagtacagtggtgcgatctcggctcgccgagccaccacacctcgccaggtttcaagggataagtaggatacatgaaagtttggtaggaaacaaagagtaagagatttcaggcccaggctgggcacggtggctcacacctgtaatcccagctctttgggaggctgaggcagatagcttgagttcaggagttcgagacaagcctgggcaacatggcaagaccctgtctctaaaaaatatataaattaaaaataaattcaggccaggcgcagtgactcacatctgtaatcccagcacttagggaggccaaggtgggtggatcatttgaggtcaggaggttgagaccagcctgaccaacgtgatgaaattctatctctaccaaaaaattaaaaaattagtcaggtgtgatggtgcatatctgtagtcccaggtacttgggtggctgaggcaggagaatcacttgaaccagggaggtggaggttgcagtgagccgagatggtgccactgcactccagcctgggtgacagagcaagactctgtctcaaaaataaataaataaattaattttaaaaaagagatttcaggcccatgtcaagggcaaagaacagagtcaaaaaagaaaaattgctggccagggcagggcctggtggctcatgcctataatcttagcagtttggtaggctgcggtgggagcatcacttgaggccaggagtttcagaccagcctgggcaacatagcaaatccctgtctctatttctttaaaaaaaaaaaaaaaaatctggccagaaaaaccacatccaaaccaaagacatatttagttttgctcgcacaacatttttagaaatttttgaattagttgccaacattgaaagatctagagctttcacataaaaatccatatttctactttatcttgaaaagccaagtttggctacacagggccagcatttcttcatggtgacaagtggctggcaccaccacagcccctccactccctgttctggttcacccgccctgcctcagatgctcatgttacctgcacagtcctctctagtgaatgaaagacggctgccaatcctttgtaaatttccacatcaaaagaagttggctgggtgtggtggctcacacctttaatcccggcactttgggaggcaaaggtggatggatcacctgagctcaggggtttgagaccagcctggccaatatggtgaaaccccatctgttgccaaaaagagtggtttgtttgtttgtttgtttatttgtgtatagacagggtctcactctattacccaggctggagtgcagtggtgtgatcatagctcactgcagacttgacctcttgggctcaagcgatcctcccacctcagcctcccaagcagctggaactataggcacacgccacctatagtctggctaatttttaaatatttttagagacaagggtcttactttgttgcccaggctggtcttgaactcctggccctaagtgatcctcctgccttggcctcccaaaatgctgggattagaggtgtgagccactgcacccagcccgctaactttttatattattcgttgagttaggatctctctgtgttgcccaggctagtcttgaactcctgggctcaagaaatcctcctgccttggcccctcaaagtgctgggattacaggtgtgagccaccacactggagccattatttattattattttgtttgtttgtttgttttgaaacagggttgcactttgttgcccaggttggagtacagcagtgtgatgttggctcactgcaacctctgcctccctggttcaagcaatcctcccacctcagcctcctgagtagctgggacaacaggtgcatgcccagctaattttgtatattttttgtagacacaaggttgcaccatattgcccaggcagttcttgaacttctgagctcaactgatccacccgccttggcctcccaaagtgctatgattataggtgtgagccactgcacctggccaaattgacaaccattttgttatttctcattattctgggattttgagcagaagcatcctgagaaaggaagcaaaaccttttagtctactgaaaggataggcctgtaattgtcacagaataacttctaccacattctatcagttaagcagtcatgggagctgggtgtggtggctcatgcctgtaatctcagcactttgggaggctgaggtgggcggatcgcctgaggtcaggagtttcagaccagcctggccaacatggtgaaaccccatctctactaaaaatacaaaaattagccagctgtggtggcgtgtgcctgtaaccccagctactcaggaggctgaggcacgagaatcgcttgaacccaagaggtggaggttgcagtgagctgagattgtgccactgcactccagcctgagtgatggaacaagactctgtttcaaataagtaagtgagtaagtaagtaagtaagtaagtaaataaataaataaaagatggatcagaagaaggtgagatggcctgcagattacttagggggttcctgcaatggtagaagcaactcaactcaggtagtgtcggtagtgatgaagagaaaaggggagattcaaggtcaagactcctcactccaggaggccctccctggggttctaatgggacatgcaggtcagaaccaggaaacacagagacaggtttgtacctcagagacaggctgagagtcatcagagtttgcaattgaagctgcctatgtggataagatagtgtggggagtttgagtgcaataagaagagatggaggtgcgggactcacgtctgtaatcccagcactttgggaggctgagatgggtgggttgcttagggccaggagtttaagaccagcctgggcaacattatgggaccccccccgcctctccaaaaaccagaagtattagccaggcatggtgttgcacgcctttagtcccagcactttgggaggctgaggcaggaggatcgcctgagcccaggactttgaggctgcagtgagctgtaattgcacccctgcactccagcctgggtgacagaacaagaccctgaatctaaataagtaactaagaggtggagtcctgggaggactctgggtgtaatgagtaaagcagaggaagagacaccccacaggggattgacagagaaagccatagagaaagatgagaacaaggggagggtgcgtcgtcgcatattcgaaaggaacatgttcaaggaggaggcatagtcagtagcattggatggacaccaaaacgtgtttgcctgatttgatgaccaggaagttactggtggccctgctgagggcaaatcttttttttttttttttttaatggagtttcgctctgtcacccaggctggagtgcaatggctcaatctcggctcactgcaacctctgtctcccgggttcaagcgattctcctgcctcagcctccccagtagctgggattacaggtgtgcgccaccacacccagctaatttttgtgtttttagtagagatggggtttcaccatgttggccagggtggtcttgaactcctgacctcaggtgatctgcctgcctcagcctcccaaagtgttgggataacaggcgtgagccaccgggcctggctggtgagggcaaatatatgtggaatggcgagggcagaagacagactcaagtaggtggaaaagtaggaaatgaggaagtggagacagtgagtgtccaccactctctcaagaaactcacatgtgaacaataggagtgaaatagggaagtggtttgaggttgccaagttgagagaggttccccctgcacacaggaacctgggtgtgttttatatcctgaaaagagagggtctgcagagagaggcctgccagtagaggagaaaagggtgaaacgatgaggtgagatcactgaagaaatgggaggaatgtgtcccaagagggatcggccttgggcccaatgagaaccattactttaaaaacatttttttagagacagggtctccttctgtcatccaggctggaatgcagtggcgcaatcatagttcactgaagcctccaactcctgggctcaagggatcctcctgcttcagcctcccgagtagttaggactacaggcacatgccatcacacgtggctaatattttattttatttatttatttatttatttgagacagagtttcgctcttgctgcccaggctggagtgcaatggtacaatctcagctcattgcaacctccgcctcccgggttcaagcaattctcctgcctcagcctcccaagtagctgggattacaggcatgcgccaccacgcctggctaattttttgtatttagtagagacagagtttcaccatgttggtcaggctgatatcgaactcctgacctcgggtgatccgcccgccttggcctcccaaagtgctgggattacaggcattagccaccgtgtccagcccatattttatattttgtagaaatggagtctcactatgttgttcaggcttgtctcaatctcctggcctcaaatgatcctcctgccttggcctccagaagtgctgggatttcaggcatgagccactgtgcccgggcaggagtgctttcagaatgtgagtcagtgctgaccctgcaggtagatggaagatcagggccacatgaggaggtgccaggctaccagagcaacctcttgccaatgaaactgttacttctttacctggagacttgtgggggctccgtgctactcactggagaaaactccttgagaaggctctgtttgaggtcccccatgctctgcccctatggaccttcccagcattctgacctttcctctcaccccaagcatctgaggccccagccttgggggacagctctccattccctaaaacgtcatgatcttttcctgccttcatctgaatggctcttctccctcctgcctctcttctttgcttggcagactcctattcaatacctagttcaggccaggagcagtggctcacgcctgtaatcccagcactctgggaggtgaggcaggcggatcacctgaggtcaggagtttgagaccagcctgggcagtatagcaagaccccatctctaaaaaaatagaaaaattagacaggtgtggtggcttgcacctggaatcccaacactttggggtgcccaggcgggcggatcacctgaggtccggagttcgagaccagcctggccaacatggtgaaacctgtctctacaaaaaatagaaaaattagacaggtgtggtggctcacacctggagtcccagcactttgagaggccgaggcatgcagatcactctgaggtcaggagttcaagaccagctcagccaacatggcaaaaccccatctctactaaaaatacaaaaattagctgggcatggtggcaggcacctataatcccagctactctggaggtggaggcaggagaattgcttgaacctgcggggaggaggttgcagtgagccgagatcgtgccactgcactccagactgggcgaaacagcaaaactccatatcaaaataaagaaatcatgtctgctatggcagacccacagtcagctgcagctctgagccaactgcaggatgaagaaccattgcctaattggaaagtgtcagcatcccagaattcaaaaaagaaatctgatgaggcttttcctgcttgatatattatatggagaatttagatcttatgttggtttgcacaagttccctgcagaaaaaaaaattgctctgtgtatatctcttggaaaataagataatactatttttcctttgcaaaggcagctataacagatgtgaagactcagtgctcggtggtgcccaggctggagtgcagtggcgtggtctcggctcgctacaaccccgtctgggaagtgaggagcgtctctgcctggccacccatcgtctgggatgtggggagcccctctgcctggctgcccagtctgggaggtgaggagcgtctccgaccggccgccatcccatctaggaggtgaggagcgcctctttccggccgccatcacatctaggaagtgaggagcgtctctgcccggccgcccatcgtctgagatgtggggagaacctctgccccgccgccccgtctgggatgtgaggagcacctctgcccggccacgaccccgtctgggaggtgaggagcatctctgccccgccgccccgtctgagaagtgaggagaccctctgcccggcaaccaccccgtctgagaagtgaggagaccctccacccggcagccgccccgtctgagaaatgaggagcctctccgcccagcagccaccccgtctgggaagtgaggagcgtctccgcccggcagccaccccgtccgggagggaggtggggggggtcagccccccgccaggccagcagccccatccgggagggaggtgggggggtcagccccacgccccgccagccgccccgtcagggagggaggtgggggggtcagccccccgccaggccagccgccccgtccgggagggaggtcggggcgtcagcctcccgcctggccagccgccccgtccgggaggtgaggggcgcctctgcctggtcacccctactgggaagtgaggagcccctctgcccggccagcggccccgtccgggagggaggtgggggggtcagccccccacccggccagccgccccgtccgggagggaggtgggggggggtcagccccccgcccggccagcggccccgtccgggagggaggtggggggggtcagccccccgcccggccagccgcccggtccgggagggaggtggggggggtcagccccccgcccggccagccgccccgtcccggagggaggtgggggggtcagccccccgcccggccagccgccccgtccgggagggaggtaggcgggtcagccccccgcccggccagccgccccgtcagggagggaggtggggggttcagccccccgccaggccagccgcccggtccgggagggaggtcggggcgtcagccccccgctcggccagccgccccgtccgggaggtgaggggcgcctctgcccggccgcccctactgggaagtggggagcccctctgccaggccagccgccccgtccgggagggaggtggcggggtcagccccccgcccggccagccgccccgtccgggagggaggtgggggggtcagccccccgcccggccagccgccccgtccgggaggtgacgggcgcctctgcccggccgcccctactgggaagtaaggagcccctctgccaggccagccgccccgtccgggagggaggtggcggggtcagccccccgcccggccagccgccccgtccgggagggaggtgggggggtcagccccccgcccggccagccgccccgtctgggaggtgaggggcgcctctgcctggccacccctactgggaagtgaggagcccctctgccaggccagccgccccatccgggagggaggtgggggggtcggccccccgccgggccagccgccccgtccgggagggaggtgggggggtcagccccccgcccggccagccgccccgtccgggaggtgacgggcgcctctgcccggccgcccctactgggaagtaaggagcccctctgccaggccagccgccccgtccgggagggaggtggcggggtcagccccccgcccggccagccgccccgtccgggagggaggttggggggtcagcccccgcccggccagcggccccgcccgggaggtgaggggcgcctctgcccggccaccaccccgtctgggaggtgtgcccaacagctcattgagaacgggccaggatgacaatggcggctttgtggaatagaaaggcgggaaaggtggggaaaagattgagaaatcggatggttgccgtgtctgtgtagaaagaagtagacatgggagacttttcattttgttctgtactaagaaaacttctgccttgggatcctgttgatctgtgaccttacccccaaccctgtgctctctgaaacatgtgctgtgtccactcagggttaaacggattaagggcggtgcaagatgtgctttgttaaacagatgcttgaaggcagcatgctcgttaagagtcatcaccaatccctaatctcaagtaatcagggacacaaacactgcggaaggccgcagggtcctctgcctaggaaaaccagagacctttgttcacttgtttatctgctgaccttccctccactattgtcctatgaccctgccaaatccccctctgtgagaaacacccaagaattatcaataaaaaataaataaattaaaaaaaaaaaaaaaacagatgtgaaaataaatacactcaactctaatatgattatacagaagagcatgaatgcatttcaaatgttagatgttgctagtattatcaaatgatttatttttcttttcttttcttcttttcttttcttttttttttttttttgaaacagggtctctctgtcaccgaggctggggtgcagtgacacaatcatggcctaatgcaacctcgacctgctgagcttaagcaatcctcccacctcacccgcccccagagtggctgggactgcaggcacgtgccactgtgcccagttatttattttttccttttaaattttttgtagagacaaggtcctactacgttacccaggctggtctcaaactcctggactcaagcaatcctcccacctcggccttccgaagtgctaggattatgggcctgagtcaccacactcagcctcaaataatttcatattgaccttttaatcattattcctctctgccaagcactgaaaagttgaatcattatactctatttctgcagtgatatagattatgaaaattcctttcgaattcattgcagcagctaacttttttgagtcattgacttcattttatattttaaaaattatgaaataccgtctgtcattgcattctaattaaaatttgtgcagaatgctttgggaaaatggatcttttatagaaaaaaaactggaacaaatgatttcttttctttcttttttttgttttttgagatggggtcttgctctgttgcccaggctggagtgcagtggcatgatctcggctcactgcaacctccgcctcccgtgttcaagcaattctctgcttcagcctccacagtagctaggactacaggtgcccactaccatacccggctaatttttgtatttttagtagagatggggtttcaccatattagccaagctggtcttgaactcctgaccttttgatccacccaccttggcctcccaaagtgctgagattacaggcgtgagccaccacgctcggcctgggacaaatgatttctatggctttcaaagataaaatatataatatactaaatcaggggtgtccaatcttttggcttccccggaccacattggaagaagaattgtcttgggccacacataaaatatactaacgatagctaatgggctaaaaaaaaaaaatcacaaaaaaatctcataatgttttaagtttaccaatttgtgttggtctgcattcaaagccatcctggatcatcctggggttgcacaagcttgcactaaaccaactctaacatagcttattctgttttactgttaaattatatctctgggctgggcaaggtggcgcatgcctgtaatcccagcactttggaaggccaaggtgggcagatcacttgaggccaggagtttgagaccagcctggacaacatggcgaaaccccatctctactaaaaatagaaaaattggctgggcacggtggctcatgcctgtaatcccagcactctgggaggccgaggcaggcagatcatgaagtcaggagttcaagaccagcctggtcaacatggtgaaaccccatctctactaaaaatacaaaaaattagccaggtgtgggccggttgcggtggctcacacctgtaatcccagcactttgggaggccgaggcaggaggatcacaaggtcaggagatcgagaccaacctggctaacacggtgaaaccccgtgtctactaaaaatacaaaaaattagctgggtgcggtggtgggtgcctgtagtcccagctactcgggaggctgaggcaggagaatggcgtgaacctgaaagacggagcttgcagtgatcacaccactgcactccagcctgggcgacagagcgagactctgtctcaaaaaaaaaaaaaaaaaaaattagctgggtgtggtggcacacacctgtaatcccagctactccggaggctgaggcaggagaattgtttgaacccagaaggcggaggctgcagttagctgagatcatgccactgcactccagactgggcgatagagcaagactctgttttgaaaaaaaataaattagccaggagggttggtgcactcctatagtccctgctacgtgggaggctgaggcatgagaattgcttgaacccaggaagtggaggctgtagcaaactgagattgtgccactgcactccagcctgggcaacagagcgacaacccgtctgcgaaaaaaaaaaaaaaaaaaaagcttttatggatgattaaattttagtacatttccaaaaaaaaaattcttgctaaatttaggtgtaattaattatgtattacgtaatggtactgtggttaggtaaagtaatccttatctgacatacaataatatgacgaatctcaaaacattatgaaaagtgaaaaaaagcagacccgtattgtatatttcatttgtgtggaacattctagaacaggcaaaattaatctataatgacagcaaaaagatcaatcgctgtctggggctgaggttggggattgattggggaaggaacttattttttttatttttattttttttgagatggagtctcgctctgtcgcccaggctggaatgcagtggcgcgatcttggctcactgcaacgtccgcctcctgggttcaagcgattctcctgcctcagcctcctgagtagctgggaccacaggtacttgccaccacgcccggctaattttttgtatttttagtagagatggggtttcaccgtgttggccagaatagtctcaatctcctgactggcagccactgcgcctggcgagtggaaggaaattttaagggtgatgggagtatttcatattttgattatggtagtaattacatgggtatgtatatttgtcaaaactaactgaatcatgcacttaaaatgaatgtgctttattgtatgaaaattaaagtgggctgcgcgcagaggctcacgcctgtaatcctagcactttgggagcctgaggcgggtggatcacgaggtcaggagtttgagaccagtgtggccacatagtgaaaccctgtctcaactaaaaatacaaaaaattagccggctgtggtggtgtgcacctgtaatcctagctacgtgggaggctgaggtaggagaatcacgtgaacccgggaggcggaggtttcagtaagctgagatcgcactactgcactccagcctgggtgacagcgtgagactccgtctcaaaaaaaaaaaaaaaaaaaaaaaaaaagataaaaaaagaaaattaaagtgtgttttgttgtatgtaaataaagtttgttttaaaaagaaggaaaataacgttacaactagaataaaaataatccgccaggcatggtggtgcacacctgtaatcctagcactttgggaggccaaggtgggaggatcgcttgagcccaggaattcaagaccagtcttggcaaaatggtgaaaccctgtctctacagaaaatgcaaaaattagccagttgtggtgatgagcacctgtcccagctacttgggaggctgaggcaggagacttgcttgaacccaggaggaagaggttgcagtgagctgagatctcgtcactgcactggaattacaggcacacgccaccacgtccagctaatttttgtatttttgtagagacgggtttttgtgatgttggccaggctggtctcaaacttctgacctcaggtgatctgcccaccttgaccctgaaaagtgctgggattacaggtttgagccactgcatctggccagatctaagagatttttttttaagtctctgtgtgttagaggtaaatactgaagttttttttttttgtttttttgagatggagtctcactgtgtcgccagtctggagtgcagtggcatgatcttagctcactgcaacctccacctcctgtgttcaggcgattctcctgcctcagcctcccgagtagctgagactacaggtgtgcaccaccacgcccagctaatttttctgtttttagtagagatggggtttcaccatgttggccaggatggtctcaatctcttgacctagtgatctgcccacctcagcctcccaaagtgctgggattacaggtgtgagccactgtgcctggctaatactgaagtatttaagttgaaatgctatgatgtctgagatttgttttaatacattctgtttttttttgttttgttttgttttgagacggagtctcaatctgtcgcccaggctggagtgcagtggcgcaatctcagctcactgcaagctctgcctcccgagttcacgccattctcctgcctcagcctcccgagaagctgggactacaggcgcccaccacctcgcctggctaattttttgtatttttagtagaaacagggtttcaccatgttagccaggacggtctcgatctcctgaccttgtgatccgcccgcctcagcctcccaaagtgctgggattacaggcgtgagccactgcgcccggctgttttaatacactctaagaaaataatgtgaaaaaagaaatgaatcaatgtttgctaatattgccatatttgaatcaaatattgccaatatatgttgaccattgtcaaagctggatgatgggtacaaaagagtttattatacaattattcccgttttctgtatttgaaaatgtctacaggccgggcatggtggcacatgcctgtaatcccagcactttgggagcctgaggcaggaggatcacttgaggtcaggagttggagaccagcctggccaacatggtgaaaccccatcactactacagatacaaaattagctgggtgtggtggtgcatgcctgtaattccagctactcaggaggctgaggcaggagaatcatttgaacccaggaggtgaaggttgcagtaagctgagattgcagcattgcactccagactgggcaacagaatgagactctgtctcaaaaaaaattggctgcatgaggtggctcatgccagtagtcccggcactttaggagcccaaggtagaggattgcttgagcctaggaggtcgagtccacagtgagctctaatcgagccactgcactccagcctgggtgatagagtgagaccctgattcaaaaaataaaaataaagttaacaaattcttgaaaacagataaaataggctgggcgcagtggctcacgcctgtaatcctagcattttgggaggccagggcaggcagatcacctgaggtcaggagtttgagaccagcctggccaacatggtgaagccccatctccactaaaaatagaaacaaattagctgggcatggtggtgaacatctgtaatcccagctactcaggaggctgaggcaggagagtcgcctcaacctgggaggcagaggttggagtgaaccaagattgtgccattgcactcctgcctgaacaacagagtgaaactccatctcaaaaataataataataataataataagagataaatccttattaccatcaaaagttaaaaaagaagaaagaagggccgggagcagtggctcacgcctgtaatcccagcattttgggaggccgaggcggacggatcatgaggtcaggagatcaagaccatcctggctaacagggtgaaaccccgtctctactaaaaatacaaaaaaattagccgggtatggtggcgagcacctgtagtcccagctacttgggaggctgaggcaggagaatggcgtgaacccaggaggtggagcttgcagtgagctgagatggcaccactgcactccagcctgggcaacagagcgagactctgtctcaaaaaaaaaaaagaagaagaagaagaaggaaacctagttcaaattttgataaggaaaaaaaaaaagagagaatttgttgcttcacataatggaaaggatctagcttcaagtgcggctggacccagggcgggctccgggagtctgtcttgttctctccctttcttgaccctactgtcctctaggttggttctgttctcaggcagttttgcttcagatgaaggtgggatgactaccagcatttcttagacttctatcctataatgtgagtcatccaacagaaagttccaataaaaggcctgcaattagcactttgggaggccgaggtgggcggatcacctgaggtcaggagtcccaaaccagcctgaccaacatggtgaaaccccgtctctactaaaaaaatatggaagtagccaggcttggtggtgcatgcctgtaatcccagctcctcaggaggctgaggcaaggagaatcgcttgaacctggaaggtggaagttgcagtgagccgtgattgcgccattgcactccagcctgagcaacaagagcaaaactctgtctcaaaaaaaaaaaaaaaaaaaaaggcctggaattagttcgcagggcactgttggcctggcctgggtctccagcgctcatcactcctctcttaatcagctgttctctaatggcaggagtgtgctaattagcctctgaatccccagcacaaagcaccctgcctgggacacaagtaggtgggtggatggatggacagatgggtgaggaagaggatagaaaataagcaacacagtgagaccatgtctctaaaaaaattaaaagagggctgggtgaggtggctcaggcctataatcccagcactttgggaaaagctgaagcgggagaattgcttgcattcaggagttcaagaccaacctgggcaataatgcaaaacccccatctccacaaaaaatttaaaaattagctgggtattatggcacttgcctgtagtcccagtgactcgagaggctgaggtgggaggatcgctcacttgagcctgggaggtggaggctgcagtgagctgtgattgtgccactgcacgccagcctgggcgacagagtgagacgctgtctcaaaaataaattaattaaattaaataaaaaataagaaaaagagctgggcacggtggctcacgcctgtaatttcagcactttggtaggccaagatgagcagatcgcctgaggtcaggagtttgagaccagcctggacaacatggtgaaatcccatgtctactaaaaattcaaaaaatttggccgggcgtggtggctcacgcctgtaatcccagcactttgggaggccgaggcgggtggatcatgaggtcaggagatcgagaccatcttggctaacacagtgaaaccccgtctctactaaaaatacaaaaaattagccgggagcggtggcaggctcctgtagtcccagctacttgagaggctgaggcaggagaatggcgtgaacccaggaggcggagcttgcagtgagccgagatcgcgccactgcactccagcctgggcgacagagccagacgctgtctcaaaaaaaaaaaaaaaaaaaaaaaaaaaaaaattcaaaaaattagccgggcgtggtggcgggcacctgtaatccctgctacttgggagcctgaggcaggagaatcgcttgaacctgggaggtggaggttgcagtgagccaaggtcgggttactgcactccagcctgggcgacagtgtaagactctgtctcaaaaaaaataaaaaataaaaaataagaaaaataagaaaagggtccctttcacatgtttacaaagcatgctaccatgctaagggcagaaactccaagtggaagtgacttcccaaagacagcatgttacgtgtgtcattctagggccacactttctccatggagaaggcggagggggtagggaaagttgccagcacactccagcctggttcctggcactgtgcccagcatttatagctagtttccattagtcctcatcctctataaagtgagggccactgtgcacctgtcctagatgaggaaaacgcacctggccagggacagtaaggagatgctgaaaccaaggttatcaggggtgcctgaccccaccatgctccacagcctcctttgggcaagacagactagggaagctctgtgaaccttgctaaagacattggactttggccgggcatggtggttcacgcttgtaatcccagcactttgggaggcccaggtgggtagatcacctgaggtcagaagttcaagaccagcctggccaacatggtgaaaccccctctctactaaaaatacaaaaatttgccaggcaaggtggcatgcaccgtaatcccagctactcgggaggctgagtcaggagaatcgcttgaacctaggaggcgcaggtcacagtgagcagagattgtaccactgtactcaagcctgggtgacagtgagactctgtctcaaaaaaaaaaaaaataaataaataataaaaataaaaagaggagtaatgatttgattccaacacttcagtctacctctactgtaggtatctggctccttggaagggcctctggtcctgtctccctccagggtaggtgtaatcagaactttttcagctgcaagtgccaggaatccaactcatacttcttggcttacgtgaaaaagaagtgcattgccttatacaacaggaaagttaagggtttcaggcacagcttgatccagacactcaaatgatctcaagaatatgtctcttcatatctggcctcttcaggcctctgtgtagacccatcctagccagctttttgctgttttttttgtttttgttttttgtttttttttttttgagacagagtcttgctctgtcgtccaggctggcgtgatctcgggttaccaaaactcccacctcctcagttcaaactattctcctgcctcagcttcccaagcaactgagactacaggtgcacaccaccatgcctggctactttttatatttttagtggagacaggttttgccatgttggccaggctggtctcaaactcctggcctcaggtgatctgcctgcctcggcctcccaaagtgctgggattacaggcgtgagccactgcaccttgctctgaccagcttttcctgcataccaacaagatatcaccagcagtgctgggcttacatcctatcagcttcctaactcccagtggagagagggcatctttttcacagcagctccaaggtgagtcttgggcacaagatgaatcaagtgcccatccctgagccaatgaaaacaggttgctttggttgggaagcacaggccatgtgaatacgccaggtcccctcctgaacctcatggagtgcctgtgaggagaggttggttccccaaaagaaaatccaataaagaggcgacgggaccaggcacggtggctcatgcctgtaattgcaccactttgggaggctgaggcaggaggattgcttgagcccaggaggtcgagacccacctaggccacatagtgagatcccgtctctaccaacaatttaaaaaattagctaggtgtgttgggcatgtgcctctggtcccaggtactcgggaggctctgaggatggatgggaggatcgcttgagcgtgggaggttgaggctgcagtgagctgtgatcgtgccattgcaccccagccagagggagaccctgtctcaaaaaaaaaaaaaaaaaaaaaaagagagaggcaatggtaagagctaaaccagcaggaacaagagaggcaaaggtcccccttttttttcttttaattgaaactgggtctccctctgtcacccaggctggagtgcagtggtgcaatcatagctcactgttagcctggaactcctgggctcaagcgaacctcccacttcagcctcctaagcagctgagaacacaggcacatgccaccacagctggctaatttcattttttttttttttaagagatggggtcttgctatgctgcccacactggtctcaaactcctaggctcaagtgattctcgccgctcctgggcaaatgccctctgacatcccttataaggacaccctttgaaaaggttgtccccctctcaaacatggagagccttgccagggccttccccactcactgctgtaactaattcttatgctgcatggacatctgcttcccagaacctccacccaccagccttgcccctgacctttgtggcagccccaaggctgcccaccccttcccctgctgcagcccacttggcctctgaaagcagcactgtctgcctgcaccttgccctctccagggccgtcaggctcgccaccttcaggagcctagttttcaggtccttcaccaatgccctcgtcctgtgggtggacatgaggccctccagagctgaaggcagtgtgtgcttcagtttctgcatctgtaaaatggagatagtatttgctacccaggggtgctatgaggattacatgaacatagtatagtgtctagaacagtgcccagcacatagtaggcactcaataaaagccagttattattcctgtcacttctgtgggagacggcacatcagagtacccaccttatctcggtctagtcccgtccagtcgcaggcctttgagtacagtacagccctaaggtttttacaattgaataatctataaaagatttacagatttattgtctcatttgagcctagtaacttttttgttgttgttgagatggagtcttactctgttgcccaggctggagtgcaatggcacagtcttggctcactgcaacctctgcctcctgggttcaggcgattcttctgcctcagcctcccgagtagctgggactacaggcgcacaccaccatgcccagctaatttttttttttttgagacggagtttcactcttgttgcccaggctggagtgcaatagtgccatctcagctcactgcaacctccgcctcccaggttcaagcaattctcctgcctcagcctccagagtagttgggattacaagcatgcaccaccatgcccgggtaatttttttttttttttttttttgagatggagtctcgctctgtcacccaggctggagtgtagtgccacgatctcggctcactgcaacctccgcctcctgggttcacaccattctcctgcctcagcctcccaagtagctgggactacaggcgcctgccaccatgcctggctaattttttgtatttttagtagagagggggtttcaccatgttagccaggatggtctccatctcctgacctcgtgatctgcccgccttggcctcccaaagtgctgggattacaggcgtgaggcactgcgcccggccagagcctcataactttgtgaggtgggcagttcaaatcttattaattccccatttaccaatgacaaaatgaggttcagagagattagccctcttggccaagatcgcacagccagtcagtggcagaggtgggacttgaacccgtcccttgctgttccttgaacttctccacacgacagggctgtccctcagcctacaggtcacccctctagccttgcctgttggctcttcctaatcctttcaggcccagcccagatactttttaaacaagaatgatgagagctaactttttttaaaatgagacggtcttgctctttcacccagagaagactgggtgataacagtggctcaatcttggctcactgcagcctctgcctccagggttcaagctattctcatgccttagcctcctcagtagctgggattacaggggtgcatcactacaccacgctaatttttgtatttttagtagagatgcggttttaccatgttggccaggctggtctcgaactcctgacctcaggtgatccgccagccttggcctcccaaagtgctgggattacaggcgtgagtcactacgcatggctgagagctaacgtttattaagcacccgccactttctagatgaggtccttactgacttccttgggttattttaggtaatcatccccatacctcttacgtggcaggtatgactgttacagagggagaaaccgaggctgagaaaggctaagtagcggccacacctcactcagcaggtgacaggctgcggtcgcactcatgacatagtctgactctagagcaggcctttcctgcccgctgttgctgcctccagaagcctctctgaatccaagggtgggaactattcctccttgccctcgagccttcgccaaagccagggcttggagcggccgtgggctcctcctccttcccccaggctgggctcttcaggggcggaaacctgcctggcttgcctgccttgctcgaccctgtagcccctggcacgaagtaggtgcccgtgatgccggattatttcagcaggagggcaggggtgttcccgatgaagccaggagatccagggaggagaagcgactcccggggccacccatgcttagatctcagagccaggcaagagccaggtcccgggggtccaggagcgcgctcggggctcctcctcgcccgcgccccccgcgcccctcgcgccccccgcgccccccgcgccccctgcgctcgcgtctgcggggccgggaggaaggggcggcgcagccgggccggggcgggcaccgaggcctggcgggcgggcctggggcgctttcgtgcctgccagggaaaggctggcgaggaggctgggggcggacgcagggaggaaagaagcaatggggtgctcttgcgttttgacattttaaaaagaagtttagattcgcttcccggagccgggatggcagcctgcgctatggttggggaccaacgtggtgcacgggcaggggccggggagagaggcggccgcagcgggagcccgggagcgcagggcgggcctggaagagctccgccccaaggggcgcggccaccccggaggcgggcgcacggctgcttctcattcattgtcttgacaagagcatcttcagcgggcgagtccccggctcctccagctccttcctcctcttcctcctcctcctccacctccggcttttgggggatcactgtcctctctcggcagcaggtgaggctgggcctgggaggcgcgggtgggccggggcgagggccacctgtggggcggcgcgcgcgtgggagccgcgggctgcgggggcgcgcggctgtcaccgcgacccagccagcgccggggccaggtagcgggcgcagcagcccgtggggggacgctgcttggagtgggggccgccggggccccagagcgctctgcggaggcgagggctagggaccaccgcggccaagatggaggtgggtggccgggggtcagcacagtgtcgagggcccgactccccacggaattgagtctcggggagggtggggacgagggcagggtggggtgagcggggcagctgccctgggcttggagacaggaaggggttgagagcaaaacaagaaaagaccaagttcccctttccgtggtttccgggcctggtacctgtggtgggggaggaggcagggtggggcgatggcttcctgtcccccacctctggtccggggctcccctctctccagatacaggctgctcctcaagactggggctcttcacatacgctcctcaccgctctttgggcaggccgacctagcagcctcttcgggagtcctggggtggccgggggtgctggagcccccagtgagtaggcgaggctgaggctaggggcagaggctctgggcatggcaccctccaagcggcagcacaggccccttccctgagcaggaaggtgatgcggtggcacaaggtcgcccctggagttccttgctccccacccagacactgggggaaaccatcctacctggacctcagagcagtcggagtggcctctcccttcctgtgtgcagtttacatgggggtggagatggctcttaagggcacctgcttttctgagcggaggcgagaggcagaggtatggggaggaggagatacctggacctgagccagagacctgctggggaagctatcctgccgcctcactcccctcaggcagcccccacgccacttcctcctgtgtccagccccatgccagcaggcgagggaggccagctcctgtccctgcctttaggaagcgctgtgtgggtgtgagggaggtgggctctggacacggtaactaagagagaacccaccctcggagccatctgggctgatgacgcctgagtctgaaccattaggaaggacgggctctgcatccatcagccagtcagtcaacaaacatgcagtggggcaacaccacgccaggctctgttgcagaggctgagggtacagattgagagggtggctcagagtggcctggggccagggagaagggggcttgcaggttagagggaaggagaggctggggaaggcaagcaggcatcagccacagagggaagaatagggagcccctggagatgatgctgggaccttaaaagccagactgaggggtgtcctgggggaggtggggaccactggaagatcagagttgacctgaagggagaaatgctcttatgctgtgtgcccccagaatgagccggcaggtggtccgctccagcaagttccgccacgtgtttggacagccggccaaggccgaccagtgctatgaagatgtgcgcgtctcacagaccacctgggacagtggcttctgtgctgtcaaccctaagtttgtggccctgatctgtgaggccagcgggggaggggccttcctggtgctgcccctgggcaaggtgagcccctggggccctggggggagcagctcctccaccggacccatggctctgtgcaggtcctgattaggtgacggtcaccaggccttccagggcctgtgttgccatctggaaaactgagctgggccccatgagccttacacttcctccagctcctctgtgctgtggctgtgtggaaactgacgctcagaaggagccaacacaagatgggtcacaccagtgaccaggactacagacagtcctgcagacccatgatcagccctcctgagcctcagcctggggctttctccccatggaaacacagagggggttgggatggggtctgggggccctggcagcgttctcagggttgggagggactctggctctgggcctgtctgaggacctagcaactctgtcccccagctcgcaggcagggatgatgcaagaggtgctctcccccacccgcagccctgccctcccctggagcctgctgccccctccgctggctggctgctgccccgcacccccagcacactcctgtgctctttggggggtaagacaggaaggggagatgggccccaagttgttaccttaaaagggctgatggaagcaaagagaagaggaagtggttgtcggggtgagagctgggcccgcgccccacatggctgtcacacaggaagccctgctgaagcagctgtccccggaagaagccatttccaaacctctgctcctgcctggggccagttgggacaggctccctggcccctctccttttgggaggacccacccctgcagccccaccactcacactcgctctctggggagctgcctccacccccccagcccccatacacctgtcctggctccagggccagttgtgcccatggaagcctcactcggggaagctggggtgggggtgccaaccctaagggcagagacagactgagacagagaccggcgggaactctgccagggtcttgcacggcccccaacctctgccatgcgtggccagccctcctggggtttgcccaggccattttgggactggaacaagagaagaacaacccgcccccgtccccaccccaggccctggtccagctcccagggacaccacagctttcctctctgggcctctctgaaggaggtgtggggaggttggattgggtttgggaggcaaaagcacctccaaggccctgctgtgcctttagactggacgtgtggacaagaatgcgcccacggtctgtggccacacagcccctgtgctagacatcgcctggtgcccgcacaatgacaacgtcattgccagtggctccgaggactgcacagtcatggtgagtggtggtggggacccaggggctgggagaggggctctaggatgggatctgacatttggagtcctgaagactcactggcccctcctctgcaggtgtgggagatcccagatgggggcctgatgctgcccctgcgggagcccgtcgtcaccctggagggccacaccaagcgtgtgggcattgtggcctggcacaccacagcccagaacgtgctgctcagtgcaggtgctgcgggaggaggggcttgggggtggctcgtggcctgcagtggatgagggcaggaggctcatggcttctgacactgtggggaacgtgcaggttgtgacaacgtgatcatggtgtgggacgtgggcactggggcggccatgctgacactgggcccagaggtgcacccagacacgatctacagtgtggactggagccgagatggaggcctcatttgtacctcctgccgtgacaagcgcgtgcgcatcatcgagccccgcaaaggcactgtcgtagctgtgagtcgccatctaccctgacctttgaccctacagcctttatccttcttatccaccatcagccaggcccttggatgctgccctccctcgcctccacctgggactggccccgtagggtatgtacgggtgcctgacctaccacctccctttccttgcaggagaaggaccgtccccacgaggggacccggcccgtgcgtgcagtgttcgtgtcggaggggaagatcctgaccacgggcttcagccgcatgagtgagcggcaggtggcgctgtgggacacagtgagtgctggggcaggaagccgagggcccccaggctgggaaccaagactggaggtttcgtccctgctctgccactcacctggcaggatggccatgggcctcagtttacccaggcgtgagatggttgttcccactggttggtcgggagggccctcacaggtcactgcccagggaagaccaccatcccagggcctgggatgttacctctcacctgtgtctacagaagcacctggaggagccgctgtccctgcaggagctggacaccagcagcggtgtcctgctgcccttctttgaccctgacaccaacatcgtctacctctgtggcaaggtggcctcgtcgggcggggtgggggtgggaggtgggcaggatgggcctggagagggccagggcagtgggcatccgctggtattgaccctccctccacacctgccacctacagggtgacagctcaatccggtactttgagatcacttccgaggcccctttcctgcactatctctccatgttcagttccaaggagtcccagcggggcatgggctacatgcccaaacgtggcctggaggtgaacaagtgtgagatcgccaggtgactgacccccggccctgaccgcagcatgctccttgggcagtgggcagtcccaagcccacccaaccagactgtgggccccgctcaccttccccttcccacaggttctacaagctgcacgagcggaggtgtgagcccattgccatgacagtgcctcgaaaggtgatgctcccccgccccaccctgggctccaggctgggcactgactttgcggtcttgtggggggtgtcctggcataagcgctttcctcactatccctggccttgcccacagtcggacctgttccaggaggacctgtacccacccaccgcagggcccgaccctgccctcacggctgaggagtggctggggggtcgggatgctgggcccctcctcatctccctcaaggatggctacgtacccccaaagagccgggagctgagggtcaaccggggcctggacaccgggcgcaggagggcagcaccagaggccagtggcactcccagctcggtgagagggctgggaagccagggaataaaactgggagggtggggtggggctggtgtttggggcacctcaaactcacaacattgggaatctttgtgggtccgggaatggtaatcctgaggcctcagaacacaggtttcagattgataggcctgcaggtctccaggcagcaaccagctgagcgactaaagggcccaaggccagggctctagggatggggctcagcagaggctggggtaaggggagccagggaggagctgggcctaatgcagcaccgggtccccaggatgccgtgtctcggctggaggaggagatgcggaagctccaggccacggtgcaggagctccagaagcgcttggacaggctggaggagacagtccaggccaagtagagccccgcagggcctccagcagggtcagccattcacacccatccactcacctcccattcccagccacatggcagagaaaaaaatcataataaaatggctttattttctggtacctcccagactctgatgactggtcccctagacacgcagtttgctgaaccaaccagccctagagcttcccctccaccgcgctgaggggactgacccatggcaggggatgtgggatgccccctgacttactacatcacaggaacagggccttcgtgggtagaaaccagccatgctgatgtgggccaggaggctgctctccgtttccgagctccttctcagagctgacacagctgaactatttaaggccctagcttagaacctcaataattcccaaatttaccaaaaatctgcctttcctagtcaaccaaaacatcacgttgcacgtgactctgctggcactgttgcttgtgaggaaatgaaccaaccatcacttacagggtaggcatcttttaaactgcaggtccaaagataaaaataacgagggaggctgggcatggggactcacgtctataatcccagcactgtgggaggctgaggcggcaggatcatttgagcccaggagtttgagacctgcctgagcaacacggcgagataccgtctctacgaaaaataaaataaaaaattagccaggcatggtggtgggcacctatagttccagctactcaggaggctgaggcaggaggatcccttgagcccaggaggtcgaggctgcaatgagccattgcaccactgcactgcagcctgggtgacagagcaagacactgtctctaaaaaatataaataggccgggtgtggcagctcacgcctgtaatcccagcactttaggaggccgaggtgggtgaatcacctgaggtcagaagttcgagaccagcctggccaacatggtgaaaccccatctctactaaaaatacaaaaattagctgggcatggtggcaggcgcctgtaatctcagctactcaggaggctgaggcaagagaattgcttgaatccgggaggcaaaggttgcagtgagccgagatcatgccattgtactccagcctgggggacaggagtgagacttcgtctcaaaaaaaaaaaaaaatatatatatatatatatatatatattttttaaatgtataaatacatcatatatattttaatatataaatatattatatatattatatattttaatatataaatatattatatataatatattttaatatataaatattatatatattatattttaatatataaatattatatatattaattatatattttaatatataatatatattatattatataataataaattatatattatattatatagtaataagttatatattatactatataataatatagtataatatataatatatattataatatatattatattatattatattatattatatattataatataaattatatatattttatatatatgttttatatattatatattttaatatatgaaacaggggaacttcttctaaggaaaagacagaattaaggcaacaggctgatcctagtttaccagagaagaaactgaggccgggagcaggagcccagctcactgaagggcagatcccaagtcagagtccaagtctccccacttttttatttatttaattttttctgagatggagtttcattcttgttgcccaaattgagtacaatggcacaatctcggctcaccgcaacctctgccttctgggttcaagccattctcgtgcctcagactcccaagtagctgggattacaggcatgtgccaccacgtccggctaacttttgtgttttcagtagaggtggggtctcaccatgttggccagactggtctcaaactcctggcctcaagtcatctgcctgcctcagcctcccaaagtgctgggattacaggcatgagccgctgtgcctggccttatgtctccccttttgaattcagagccttcccccgtgtagtgagtgcttctgcctctctagcccttcctgtgggttctgcctgggcctgacctctgtgagagacctggcaggaacaggtctgtcaggccttgtggggagtgggtgtgggaataggttttgatacccaacttagcaggtgatcctgagatgggaggacacagggctgtttgggatgggcgtcttagccatagtaaggtttggttcatatcaagcagggaccacccatggcgtcatttccaggccccacctcttcagtatgccatagaaaactacttgggcagtagaggtgtgggaagaaaacaaaaaagaaagctgggcataagtggcacacgcctgtaatcccagcacttttggaggccgaggcgggtagatcacctgaggtcgggagttcaagaccagcctgaacaacatggagaaaccctgtctctattaaaaatacaagattagccgggcgtggtagcacatacctgtaatcccagctacttgggaggctgagacaagagaatcgcttgaacccaggaggcggaggttgtggtgagccgagatcgtgccattgcactccagcctgggcaacaagagtgaaactctgtctcaaaaacagacaaacaaacaaacaataaaaaacccccaaaaattagctgggcatggtggcgtgtgcctgtaatcccagctactagggaggctgaggcaggagaatcgcttgaacccgggagggggaagttgtagtgagccaagatcatgctactgcactccagcctgggcaacagagccaagactctgtctcaaaacaaacaaacaaacaaacaaaaaaacgcaggaaaagagtgtgtgatggctgaaacttgcaatttctcactctcaacgagccctggccccaactaggttatttgggctccctccctaggtctcagggacctctgttcaaagtcctagcaatctgggccaggtacaatggctcacgcctaaaattccagcactttaggagaccaaggcgggcagatcacttgaggccaggagtttgagactggcctggccaacatggtgaaaccctgtctctactaaaagtacaaaaattagccgggcatggtggtgcacccctgtaatcccagctactcaggaggctgaagcacaagaatcttttgaacctgggaggcagaggttgcaatgagctgagatggcgccacggcactccagcctgggcgacagagcaagaccctgtctcaaacaacaaaaaacaaataaaacaaacaaggtcctagcaaccctactaacctgttatgaagactgatacaggggcatcacctgccccaattttctgactcaggtcagccttatattcctactctaatctcacccctatccccgtcccacacccactattcttaaaacctccatggtcctccgggggcagctgtagacacattaagcccagggctatggggccactggaaccttctccagtgggtctgaaaacatcagcattccaggagttgatgagcccctacctgggcaccactccctcttgggcctgagaaggccggggggaacctgcaaggaatatgtggaattctatatggtgcctctgatactgcggtaatgtcagggagaggtttgttcaactggtcagggccctgaaaccccgatcactttctcatctctgcatcttgaaggctagcagagaggaggaaccctgagctctctaggaggtgggtaggtggtggcagtacagactcctagatgtctaaacggagttgcagagagaaggctttctcggtagaccctggaagggacttttacggtagaactttcattttacaagcagggatagaggcctagatggggacagagacgtgtccaaggtaaaacaatggacggaggcagggcagggagaggccaggtcctagactcggcctcagcacccctcccacacacacatcgacacagaagctggtccagatttataatttaatggctgtgcagatcccagtccctcatttctgtcgctcacgtgcccactggtctggggtcagggttttctgttcaaaggcatggatgtgcgggagctcttctgctaggcacgcgttcaccagcctggggcgagagatggggttaggaaaaggccagcggtgatcgcacaccccgaggctagggtgacccaagagactggtgtccccaaggttgtagtccccaggccgtgggaacacgtacttggagagagggtctacatcgaaatactcgaagcaggggtcacgaaggcgggatcctcaaggtccctgagccacgccagggggagtgcgggagtcaggttgcaggggtagggggagtggctggggttgtggtacaggagctaggcaaggtgctcccagggccttacctgtgtctctgaagcagcggtttcccctcgaacttggccgacaccaccaggactcggaagctacaggagcaacggttgagggtcgtgtcctccacctcctaccgagcggaagaatatgaatggtgccgaacccgccccccgagctcttttccccttgtccggcggctcaactcaccacatgctccgcctccaggtcccgctgcagcttctcgcggaggtattcggcgctgagttccatggcggcagtccagctggaacggcagcccagcagggacacaaccccagctcgggcgccggccacgctaccttgctgccttacaggagccacttccgctggaaaactcacttccgcccttactaaggcgtacgtcaacgcagtacttccgccctcaagcagccgggctttccagcggtccaggcttttcgcgcttgccatgtgtcagccaatcagagcctgaggaaggtgggactcgggcggagccgatgctgaatggtacgcgctcgccgactggacagcagtctggcttccgcggtcggacttctacacccgcctccagacaggagaggggcacgtaccggcgctacggcttcctgcaggctgcctccggatagtccccgagagcttgttccgaagcaagcaccctgcagccctagcgatccagccctcccctggaccctaggtcacggcaatcaaccccctgctgtggttcccgaaccccaaggcccgatgggtcccgcgggggtcgcggcgaggccagggcgctttttcggcgtctacctgctctactgcctgaacccccggtaccggggccgcgtctacgtggggttcactgtcaacactgctcgtcgggtccagcagcacaatgggggccgcaaaaaaggcggggcctggcggaccagcgggcgagggccctggtgagagggggaggccttctgtgccgggaggaaggcgtcccagaggaggcggaccccgcggggcacaggcctgttgagaaggaccggccaggactgtgacagaggcggggcgtctgtggtggggacggggcctgtcgcaggggaggagcgtgacggggaggcggtgcccggggcatctccgcggcggaactcagggaaggagctagctggggcgggggtgatgatccaggctgggttccagcatagggctcttggtgggcacgctggggtcgggtggaatgcaggagagagaggaggtgggacaggtgggtacctgggctggaggcagggcctgaggtgggcaggtgcagagggctgcacttctcggctgaagccgggaatgaggaccccgctctcgggtgggattggaggggacccgcggctgaggcgctgggctgcgacagggacatcaccgttctcctcctcagggagatggtgctcgtcgtgcacggcttcccgtcctccgtggccgcccttcgggtaaggaaggagaccgggcagcggcggccgggtgagggcttgggttccgcccctcgctccgagccgccctgatgcccctgtacgccgcccgcagtttgagtgggcttggcagcacccgcacgcctcgcgccgcctggcgcacgtggggcctcgcctgcgaggagagacagccttcgctttccacctgcgcgtgctggcgcacatgctgcgcgcaccgccctgggctcgcctcccgctcacgctgcgctgggtgcgcccagacctccgccaggacctctgcctcccgccgccgccgcacgtgcctctggccttcgggcctccaccgccccaggccccggccccaaggcgccgcgcaggtccctttgatgacgcggagcctgagccagaccagggggatccaggggcctgctgctccctgtgcgcccagaccatccaggtgaggtccccccgaggaatggatggctctagagtccagacgacttcggatccagctctttcttgagggaaacccactgacacgctttggccaccctatccccatctctaagatgctgatgctataggacttacggccattcctgagcaaagcaggccctgctcagggccttcaccatttccccttcaaagaaaaggttcttccctaggccatcagtactccgctgcactccagtgtggtcgacagagcatgaccctcttttttttttttttttttttgagatggagtctagctctgtcgcccaggctagagtgcagtggcgcgatctctgctcactgcaagctccgcctcctgggttcacgccattctcctgcctcagcctcccgagtagctgggactacaggcgcccgccaccacgcctggttaattttttgtatttttagtagagacggggtttcaccgtgttagccaggatggtctcgatgtcctagcctcgtgatccgcccgcctcagcctcccaaagtgctgggattacaggcatgagccaccgcgcccggccctttttttttttttagacagagtcttgctctgttgcggaggctggagtgcagtgatctcagctcactggaagctccgcctcctgggttcaagcgattctcctatctcaacctcccaagtgtgccaccacacctgccgaatgtttgtgtttttagtagggatggggttcgccatgttgggcaggctggtctcaaactcctgacctcaagtgatctgcccgcctcggcctcccagagtgctgggattataggcgtgagccaccatgcctggacatgaccctgtctctaaaacaatgtaatgaactgcagctcattcttgtgtgcacttttctgcaccccctttcccttaacacttactattgtctggcatgctacgtgttttcttgatctcattagcctctcccaccccaactgccacactgcactatcagagggcagcacttatcactgctgtagaacaaagtcctgcactgagccgatggcccagaaattttctttttatttatttatttattttttttttgagacagagtcttactctgtcgctcaggctggagtgtagtggcgcgatctcagctcactgcaacctctgcctcctggtttcaagcaattctccttcctcagcctccagagtagctgggattacacgcgcctgccaccgcgcctggctaatttttgtatttttagtagagatggggtttcaaccatgttggccaggctggtctcaaactcctgacctcaggtgatcctgcccacctaagcctcccaaaatgctggtattacaggcatgagccaccgtgcccggcctaaatatttaataaaataatggacgatgggtgccttctactgagctcccggtaattgtgagtgagtagaggacttgccctggggacattcagtgacctgctgggtgttgctgagctgtgaggaagttcaggtctggctgcagtggtgaggctgtgactcaatcaatcactgctgatgctcccaggacctgcaccagcttagtcctaggggcaaggattttaactgtccacctcagtttcttcatttgtaagatgcaaataacagtcacccctgcctcatgggatggagctgtgtaatgcccgcaacagtgcctgctgcatagaggggttgctgccagctgcctctccctccttgtctcttacctgcctgctgcctgggtcaggatgaagaggggcccttgtgttgcccccaccctggctgcctgctaagggcccatgtgatctgcctggcagaggagtttcttcaggaagaaccagggcagcttctgcccctagagggccaatgcccttggtgagtgcagtcccctggccccagcctggtccacctctgggaagagggtgcccagttgtgcaatccaggcccaggcagctgagccctcatctcagcatgcagggcggatactggagggggcttgtggcatctgactctgtatctcctacctgcccctctccttggtagctgtgagaagtcactgctttggggagacctgatctggctgtgccagatggacactgagaaagaagtagaagactcagaattagaagaggtgagtgggctttggtggcgggctccctaccccactccctgccctgggctgcctgtgaccacactgcttgcctctgcaggcacactggacagacctgctggagacctgatcctcagtgtccttaccccctcctacctcttttctgtgccacctgctgtgggtccagcaggtttttacttgagtacaataaaaagtctgagtcaagggtgccttatggtggatgctgaggggaggggcggagctagtagcccaaggtcctgccagtcacggggcttcctcaggggcacagaggaggcaggaggggcccctggccctagcacgtgaacagcttctactctgcctggaaaccccatgcctcagctttcccctacttgcctctgagctcatgcaattcttggaagcctgggagacttaccttgaaattgaatgcaaataggacaaagaccaaggaggatggggggatgccctccttccacggggccctgtggcttccaagtcttaatctcctctagtctcttgtctacggagcctccttcaaacccagggaaagaaaatcacctgccagggttgtttttcttctaggatcttctattgatgctctgtgaggtcccccaggagccatgaagctagggctggctcctagggcaatgggactacagtgtccttgtcctttcttattctttctgttctttctttctttctttttttttttttttttttttttttgagacagagtctcactctgttgcccaggctggagtgcagtggtgtgatcttggctcactgaaacctccgcctcctgggttcaagtgattctcttgcctcagcctcctgagtagctaggattacagatgcccgccatcatgcccagctaatttttgtatttttagtagagacagggtttcaccatgttggccagcttggtctcgaactcctgacctcaggtgatcctgctgcatcgacctcccaaagtactgggattacaggcgtgagccaccacgctcagcctctttcttgttctatatgtccatgctctgctccacttctgccccttcactctgcccccacacatcactccagactggccttgtggtcagagcctggaatgcctgggctgctgggggcctgtggactgcactgggccagaacccctgccgccttcaagactggcctgtagccagcaggtaggtgacttttcccaggccggcctatcccacctttcccctccactcactcacctcccttgcctgggtcaattagagaaagcttgtcggccaggcatggtggctcatgcctgtaatctcagcactttgggaggccgaggcgggcggatcatctgagctcaggagtttgagaccagcctggccaacatggcaaaaccccgtctctactaaaaatacaaaaattaaccggatgtggtggtgtgcacctgtaatcccagctactcgggaggctgaggcagaagaatcgcttgaacccaggagggggaggttacagtgagcggagatcgtgctactgcattgcagcctgggcgagagagcgagtctccatctcatataaaaaaaagaaaaagaaagaaagaaagcttgtctgttggcctgccctgcagggtggagttcagagggaaggtcaggagcctagtgacagctcaaaaaaaaaaaaacccaaataccaatgttggccccttttgcctttcattcatgtgttttctatacactaaactcacatattgggtttgcagatcactccaagcttggctggagctgtggtggtaaggagggtaatagagaagcttccccaccctcaaccccaccccttccttcctggagttcccagccctgactttagatccctcccacactggaccttcaaaaccctcagggcagagagcagccctacactccctacaccacacccatactcagcccctgcaggcaaggagagaacaggtcaggttcccgagagctcaggtgagtgacacgttggaatggcccagggcaccttcaccctgctcagcttgtggctccaacattctagaagccgaggcctctgccatccctgccctttcccatggatattccatttcaattagacaacccagcctggccggaatccccctgcgttccttcttttcctttgtgtatttttgagacagggtgttgctccgtcacccaggctggagtgtagtgggatcctggcccactgcagcctcaaattcctaggctgaggcaatcctgccgcctcagcctcctgagtagctggggttacaagagcaagccaccacacccagctaattttgaaaaatattttttgtagaggagaggtcttgctttgttgtccaggttggtctcaaactccagggctcaagggatcctttcccgttggcctcccaaggctctgggattacaggcgggagtcaccctgcctgggcccctccttttgatgagtcatcagttttcattcccgcacgaggctctagcccctggtaccagcttagttgctcaatgggctgtgtttgttctggagcccagatggactgtggccaggcaagtggatcacagacctggccggcctgggaggtttccacatgtgaggggcatgaggggggctcaaggaggggagcatcggggagaggagcgcactgggtggaggctgggggtcccagcaggaaatggtgagacaaagggcgctggctggcagggagacagcacaggcaggccctagagcttcctcagcacagctggactctcctggagaccttcacacaccctgatatctgggccccgcgctacgagggtgctttcactggtctgcactatgccccaggccctgggattttgaacagctctgcaggtgactgaaaggtgcggccaggctggggaacgacctggtttcagccccagccccgccactgactgactttgtgagtgcgggcaagtcactcagcctccctaggcctcagtgacttccctgaaagcaaaaactctgcaaaggggcagctgggtgctggctcacacctgtaatcccagcactttgggaggctgaggtagacaaatcacttgaggccaggagttctagaccagcctggccaacatggtgaaaccccatctctactaaagaaaaaaaaaaattagctgagcatggttgtacatgcttgtaatcccagctacttgggatgccgaggcgggaggattgcttgaacccaagaggtggagtttgcagtgagctgagattgtgccacactgcactccagcttgggtgagagtgagactccatctcaaaaaaaaaaaaaaaaaagagagaatcccactttcttgctgttgtgatggtggtaagggaacgggcctggctctggcccctgatgcaggaacatggagctgatccaggacacctcccgcccgccactggagtacgtgaagggggtcccgctcatcaagtactttgcagaggcactggggcccctgcagagcttccaagcccgacctgatgacctgctcatcaacacctaccccaagtctggtaagtgaggagggccacccaccctctcccaggcggcagtccccaccttggtcagcaaggtcgtgccctcagcctgctcacctcctatctccctccctctccaggcaccacctgggtgagccagatactggacatgatctaccagggcggcgacctagagaagtgtaaccgggctcccatctacgtacgggtgcccttccttgaggtcaatgatccaggggaaccctcaggtgcatggctgggtcctgggggtaagggaagtggaggaagacagggctggggcttcagctcaccagaccttccctgacccactactcagggctggagactctgaaagacacaccgcccccacggctcatcaagtcacacctgcccctggctctgctccctcagactctgttggatcagaaggtcaaggtgaggccgggctcaatggttcacacctgtcatcccagtttgagactgaggagggaggatcccttgaaggcgagagatggagaccagcctgggcaacattgctgtagagatgacatcccatctctacaaaaataaaattaacaacctggtatggtggcatagactgttcccagttacttaggaggctcagcggggaggactgtttatgcaaataggaagctgcaatgagccctgatgatcctgctgctgcactccagcctgggcaacacagcaaaaccatctctacgaaaaaaaaagttcccactgactggcaaggaaagccaggaaggggggctcaggtgccctctcagccatgtacctgttcttctggaagggcctcctcgcttctgccaggctcatcacatctttttttttttttgagacagagtcttgctctgtcaccctggctggagtgcagtggcatgatctcagctcactgcaacctccgcctccccagttcaagtgattctcctgcctcagcctcctgagtagctgggattacaggcgtgtgctaccacacccggctaatttttgtattctttttagtagagacggggtttcaccatgttggtcaagtggatctcaaactcttgaccttgtgatcctcctgcctcgacctcacaaagtgctggaattacaggcgtgagccaccgcgcctggccctttttttttttgagacagtttcactcttgttgccgaggctagagcgcaatcgtgtgatctcggttcactgcaaccaccgcctcctgggttcaagcaattctcctgcttcagcctcccaaggagctgggattacaggtacctgccaccacgcccggctaattttgtatttttagtagagatggggtttcaccatgttggtcaggctggtcttgaactcctgacctcaggtgatctggccaccttggcctcccaaagtgccgggattagaggcatgagccaccacgcccagccttcatcacatcttgagagaggacactgtctgcctcttgctctgatgagggtctgatgcaaggatagtgagtctctacagtgcacacttaagaaaggcagcatgtgggtgctcacaggtcagcggaggagggggagctggtggggaccaggcatgccttgctccagatcaggatatgatggcattggtgcagattatattagtatagaatatggtctcaggaaccaggcaggactttggcttccgagcagggttcagatcccagcttggccctacctgtgcagtgagatctcaagcaagtcagcctctaagcctcaggttcctcctttgccagttcaacagatgagctggcctggggtgggctgtgtggtgatggtgctggggctgggtcctctgcccctgcaggtggtctatgttgcccgaaacccaaaggacgtggcggtctcctactaccatttccaccgtatggaaaaggcgcaccctgagcctgggacctgggacagcttcctggaaaagttcatggctggagaaggtgggcttgactggaggaaggagggtgtgaagccgaggggtggtggctataacgtacagcaaccctgtgtcggtgccccctgcccgcttctctagtgtcctacgggtcctggtaccagcacgtgcaggagtggtgggagctgagccgcacccaccctgttctctacctcttctatgaagacatgaaggaggtgagaccgactgtgatgcttccccccatgtgacacctgggggcaggcacctcacagggacccaccaaggccacccagccccgtccctgggcggctcccacagcaagcccggattccccatcctacctccctggcccaggcccccccactgcagccccacctggcagcaggctcggcacagctttcatcttctgcacctgagtcagctgcatgggtggccacggatcagatacttagtcctattgcttatcctcaccaaagggtgtgccacccagggccacagtcatggaagaagaccatcccggtcctcacccataggcgccaagccctgttcatgatgggatcacagggcagagatcaattcattttactccagagactagggccccaggggttgaggctctttggggtttctaggggaagtggccagatcccctctgaggttagagagggggacccgttttgttttgctccactgaggagccctctgctgctcagaaccccaaaagggagattcaaaagatcctggagtttgtggggcgctccctgccagaggagaccatggacttcatggttcagcacacgtcgttcaaggagatgaagaagaaccctatgaccaactacaccaccgtcccccaggagctcatggaccacagcatctcccccttcatgaggaaaggtgggtgctggccagcacgggggtttggggcgggtgggagcagcagctgcagcctccccataggcacttggggcctcccctgggatgagactccagctttgctccctgccttcctcccccaggcatggctggggactggaagaccaccttcaccgtggcgcagaatgagcgcttcgatgcggactatgcggagaagatggcaggctgcagcctcagcttccgctctgagctgtgagaggggctcctggagtcactgcagagggagtgtgcgaatctaccctgaccaatgggctcaagaataaagtatgatttttgagtcaggcacagtggctcatgtctgcaatcccagcgatttgggaggttgagctggtaggatcacaataggccacgaatttgagaccagcctggtaaaatagtgagacctcatctctacaaagatgtaaaaaaattagccacatgtgctggcacttacctgtagtcccagctacttgggaagcagaggctggaggatcatttcagcccaggaggttgtggatacagtgagttatgacatgcccattcactacagcctggatgacaagcaagaccctccctccaaagaaaataaagctcaattaaaataaaatatgatttgtgttcatgtagagcctgtattggaaaggaagagaaactctgagctgaaagagtgaatgcccggtggggccacatatggtcacctctcccccagccttcagctccccaggtcaccatatctggggaggggagaagggtttggagaagtaaaacccaggagatgtgtggaggggggatgtctgtttaatcccagcacatcctctgctgtcctgccccaagatggtggaggacgtcgagtccgccgggcagcgtcactttttcttgggctccttagaagctaccaggtacctctgggccacactgagatgaggggagtagccgtctgcataggaggtgtcttcaaacaggatagaatagtcctcctggggctgtggggcaggtggacaggaagggcagagagcagccccggggctggtgtcactcacttgttggtggcatggctgtaactgaccacctcggccaggatccactgctcatccccatccacggccttcacccgggcagccaccttgtctccaggtctggccacgtagtctcctgaggcagggatggccccacagaggggtgggggcctgtgagtggaacaaaggatcagtcccagcccctgggcaccagccccttcctcgcagctgctgccctcacttgtcaccaggcttcccaatccacaggggcagggtcatggccgactgctgcagcagggtcatcagcacccctctgcgcatggtcttccggggtggctccaagtcattgtagagacccgcgatcttggccactgtgggaagaaagggaggcctgaggccccagggacaggggctggccctgaccccccagcatgctgaactgagctgctggaggagcacctgggagcccccagctcccgagtgagcccgagggcacagcaggactgtgacctgatctgccaggtgtcctacaggggctgctgcgctcaactacatatgggtgagacggcagcacaccaggcacccaggggaaggaaccagggagggacaaagcgggttctgaggtgctggtgaggttctcttcttgatgtcggtgctgacacagaagtgtgtttcgttagtgaaaagttcctaaaattcgaagggtcccgcgggaatcggggcgaggccgggtgcctcttcagcgtccagctgctctactgcctgaatccctggtacccgggccctgtctacgtggggctcactgtcaaccctgttcgtccagcagcacaatggtggccgcaaaaaaggcggggcttggcggaccattggccgaggtccctgttaagagggggagggtctctgtgcccggaggaaggctccctggaggaggcggaaccggggggcacaagcctgctgagagggacccactaggtctgtgacgtgcgcgggacgtcccgggcgaggcctgttggtggggggaggctgtcgcaggggaggagcctaacggggaggcggtgccctgggaatctcggcgttagaactccggagagcagctggctgaggcgagggtgatgatccaggctggggtccagcgcaggggtcttggggggcacgctggggtcgggtggagcgcaggagggagaggaatgagaacaggtgggtacctgggctggaggcgggacctgaggtgggcaggtgcagggggcgtgccttcaggcagttgcggggccagggctcggctgaagctgggagtgaggaccccgttctccggtgggataggaggggacccgcgatgctgggctgcgctggcggtagggcgcggcggggctcacaggaacattcctgttctcctccccatggagattgtgctcgtcgtgcacggcttcccatccgccgcggccgcccttcgggtaaagaagaagaccgggcggcggcctgtggcctggatttggggtccgacccccgcccggagccgccttgactccaaccccgccgcggttggagggggcctggcacccccgccctgggcgctcctcccggtcccgttgcgccccgacctccgtcagccgcacggcactggccactgaccgtcgggcctcctccgccccagggcgccgcgcaggtccctttgctgacgccgagcctgagcctgagccggtcccggggtccaagagggctgtgtgcaccctgcgcgtccgcgcgctccaggggaggtgcgctccaggggaggtccgccccaagcagagcggcacatcctccagacgacttcggatcctgctgttgaggagccaggaaacgccctgacactgttgcggccctgtccacatctctaagatggggatggatgatagtacttctggccattcctgagcacagcaggacctgccttttccctttgactggaaggttcttctctacatcttcagtcttgataacctgccacctccacagggaggtcttccctggctcccaatttaaaattgcagctctgagaagccgggcatggtggcatatgcctgtagtcccagctacgggggaggctgaggtgggaggatcgcttgagcccaggagttggaggctgaagtgagctatgatcactccattgcactccagcctgggggaaacagcaagaccctgtctctaaaaaaataaaatacaataaaattgcggctctttcttgtgcacttccctgcccgcccccctttcctgaacccttattattttctgccatactacaaattttatgcatctcattaaaccccttccgaacctgtgtactaaactgcctgggggcagctctcatcactgctgtagaacaaagtcccacatagagccaatggccaagaaacagttaataaaataacagacgatggtcctggcctctactgtgagtgagtaaagggcttgccctgcagagattcagtgatctggcgggggttgctgagctatgaggaagttcagatctggctgcaggggtgaggctgtgactcagtcaatcactgcccatgctcacaggacactggccagcttagtccctgggggcaaggattttaccccccccccacctccatttcctcatctctaagatgtgaataatcgtcgcccctgcctcacaggattgagctgtgtaacccccctcccaccttttttctatgccatccactgcgggtctggggctttttactggaatgcaatacaaagtctgagtcaagggtgccttctgttggttgctgagggcggaggcagagctagttgcctgtggtcctgccagtcaaggggcttccagaggagggaggaggggcctgtggccctagcatgtgagcagcttctcctctgcctggaagccggacgcctcagcttctcccacactcccacctgcccgcttgcctctgaattcacacaattcttggaaggcttgggagactcacctttactcaaatggttacctgtctcgtgtctcgtgcccagcttgaccttttttttttttttttttttttttgagttggagtcttgctgcgtcacccaggctagagtgcagtggcgtgatctcagctcactgcaatctccgcctcccgggttcaagcaattctcctgcctcagcctccccagtagctgggattacaggtgcccaccaccgtgcctggctaattttcgtatttttagtagagacagggtttcaccatgttggccaagctggtcttgaactcctgacctcgtgatctgcccaccttggcctcccaaagtgctgggattacaggcgtgagccaccatgcctggccccagcttgaccttgaactttaaatagtgaagacaaagaatgaggagggtggggggatgccctccttccacagggccctgtggcttccaagcctcaacctcctctggtctcttgtctgtggagcctccttcaaacccagggaaacaaaagcacctgccacgggctgctgtttttctaggatcttctagcgaagctctgtaacttcccctgagagccatgaaactgggctggctcccagggtgatgggactccagcgtctttgttctttcttgttctatgcatccatgctctgctccaccgctgccccttcaactctgcccacacatattactccagactggccctgtggtcagagcctggaatgcctgggctgctgggggcttgcatgc

SEQ ID NO: 337 - DNA, 24116 bp, Homo sapiens
  source 1..24116: mol_type = genomic DNA
ttttctccttgtcctacagtttggaaactctggaggtcccctggttaacctggtgagtgagacatccttccttccaagaatccctgccccaggtcagtgtgggaagggtaggtttcccctaattcaaggatgtttggtcaagtttctgagcagttctttgttggctatctctcaatatccaaccagatctccccaacacttgctggtacttttgttcgggtgcccccatcccctactatttgtttaggctagggaactgggggctgtatccctgcaggatggggaggtgattggagtgaacaccatgaaggtcacagctggaatctcctttgccatcccttctgatcgtcttcgagagtttctgcatcgtggggaaaagaagagtgagcctgccttatggggaaacgggttcctttaatgtggtggaaataggggaagggcattcagtgggacttcctggagggtggtctactgggagaagagggcagggaaggaaggatgtagctgggtggggctcatttgtccctctgtcacagattcctcctccggaatcagtgggtcccagcggcgctacattggggtgatgatgctgaccctgagtcccaggtatgagctttagggacagtgacatgtaatgtgaccagtgtaatcagaggggggcacctctattgagctttgttctcatttctgtctttatctaagatgaactgtgtcacacttgaaataatcacaagagctgtctcccttcatcatcttgactttcttatcccactccactttgtacacctgtcaccagattgatttcatcctgttactgctttgatttcaagccttcaatccattaacttggcatttaagggccattttccatctgtctgtaaatcaactttctagacctggctgtaataccttcctatatgaatactcagccaacctgatttcctactcccatgttttttatttatgctgttcttgttttatatggttaatatcagatccatccttttaggctcaacttaagttctttccccttaaagcttctcttagtattctagaatgacattagtgctattgatttaacactgtttgtcatttggtgccctcatgtggtgtacatcttttatgtacatgttgcactttattgctagaagacagaaagtgagttgccattgtattttgtagtacctagcccatgtcctgtccatatatttatcaatgtgttgatgagagacttgaggtggaactcaggatggggagaatgcctgggtttggctaatagggtgatctgtgtactttcagcatccttgctgaactacagcttcgagaaccaagctttcccgatgttcagcatggtgtactcatccataaagtcatcctgggctcccctgcacaccggtgagggagaggctgcagtgtgatatggggatgggcaaggtgtgcatgtgtccttgaactaggctttgtactccttcctttctctctgtccatttttctctatagggctggtctgcggcctggtgatgtgattttggccattggggagcagatggtacaaaatgctgaagatgtttatgaagctgttcgaacccaatcccagttggcagtgcagatccggcggggacgagaaacactgaccttatatgtgacccctgaggtcacagaatgaatagatcaccaagagtatgaggctcctgctctgatttcctccttgcctttctggctgaggttctgagggcaccgagacagagggttaaatgaaccagtgggggcaggtccctccaaccaccagcactgactcctgggctctgaagaatcacagaaacactttttatataaaataaaattatacctagcaacatattatagtaaaaaatgaggtgggagggctggatcttttcccccaccaaaaggctagaggtaaagctgtatccccctaaacttaggggagatactggagctgaccatcctgacctcctattaaagaaaatgagctgctgccatcttttgtgggcagttagtcaggtgctgctctttgtggtgtggtgggctctggtctgttctgctcggtgctgggcctgggagcaaagattcccatgcttggctacagatactgacagctggcctctgaaggagggtgaaaacttctgcttgacagttccacatccatagtgcatggtctgatgagtgcggttgctgacatgggtttcttggtaagctcctgaggtaatggcagcctcagacccctgccattaggggccagtggtggtttgcagagggcagtggcacttagataatctggttgctggtctggccagggtagcgttcaaacctcctgttggcctcttcactgaaggcatcacctgcagagtggacaggcaatttgggaggcgccctgcacagagggagggagatagatgcactgtggagaagggtgggtagaagtggagggactgagagctctacaggaaggtgggaagatggagaaacaagctatggaaaagagaatgaacgtctttccctcccatcccctaatcttcctgggttgctcttcccatcaaataccaatgtggcagttgtgcacccagattctatgtccatcatatttgcagttacatttcattgcattgttggtaaagtcactctctgctacttcaaagtttgggttgatgacaacctgtgagtgagaaaaaggccacttaacccagcgacaatcctcgaattcaaaggtgtctttaacgctccccccactcacccatctggaagccccagactccaggtacctggagaatgtagtttcctggcttcacatccgtgatgtcaatccactgacagtcaatgtcatgccggtagagatcccagcaacccacagtgatgccttgctctccaaagttggcacactcataccgcttggagacatctggagggattggcatatgtcagtgtaaggaaaggctgtgcaatggataccatgtggttcacttcagtccccaactcaccctcctgacactcagtgtcttcgagacagaaactagctttgtggccctcagccaccttggtgccatttggggtgaggatatcatagtgagtgaagatgtccatgctgtggtaatgcctgtggggagaagggaacttctgtttccttctctgcccccagaaggtttgccccatcccccgtggtcttgcccttctacttgactccctaccctctcacccatggcactcgtgccacacccaggagtggcgcccagccttgggcctgaagtcagctcgtcccaggttgtggatctgggaggagaatcggagcagacgccggtgaccatagggccagttggctgagcgggctgagctggccaggcagttctcttccgcagcacagtacaacatatgcaggggccggtcttcgatgtaggcggtctcctgcaccagtgctgagtgcagcaacagatctgatgcagctgcaccaagaaaggaagggggtgttagaagtcactgctgacttcacagagaggggtgcttccatccctccctagtgtgtaagactagttttttgtttttgtttttgtttgtttgtttgtttgagatggagtctcactctgttgccgaggctggaatgcagcggcgtgatcttggctcactgcaacctctgccacctgggttcaagtgattctcctgcctcagcctcccgagtagctgggattataggcgcctgccactgcgcctggctaatttttgtagttttagtagagacagggtttcaccatcttggtcaggctggtcttgaattcctgacctcgtgatccatccgccttggcctcctaaagtgctgggattacaggcgtgagccactgcacccggcgaaactggctcttttatggggaagaagtgcccctccagattacagccccctttccctgcaaacgggtggcccagacactcccttccctggcatgcatcaccccctccttcactcactctcagaacagatgactccagcagtgaagcgggtccctgtcctcttgcaggtgatgtgggtgccatgatgggcacactgatccagggacagctcagtccctgtgcagcgcactccactcatcaccacctctgttatattcccagagtcccagtaccaggtctcctggggacatatgcagatgtttctgtaaggcccaggatccagcatcttgggccaagggactcattcctcagccctctgcccaaaacacaggctttgagacaacagcctcggctcccctttccttcccactcacctgcaggccgtggttggcgtagcccagacccagttgcctacaggccaccatggcctccagggtcccccagtcatccccacagatgaggccccagcgaaggggcccaggtccccctatttgcacctcgactcgcccctcatgttggctgcggcccccactgagtcggatctgtagtgacacagaatggaagcgctggagaaagctttggggtgaggtagtgggagtctctaacagatgtggctgaagcgtgactcaggcacataatgggctagcaagtgatgggtcaggtgggagctgcaggagggcaggggcctggggcaatgggctgggggccattggactgtagattggagaccagacctggataggatgaaagagacctcaaccaaggtagagaggatgactgaccctggtctctgccccagtgtaaggtaggttgcaccggaccccggcatcctggctatgtgaacaatcctcagctgtgatgttcttgtgggggcacttccagagggagagctcctgtccagagcagcgaacttcactcaggtggatagcacccatgcctagggccagatggcaaagatcaggaagttgtaattaagcatatattgtctgcccaggggacacctaaccttccgaaggaatatgccccccaggagcatgtacctccttccctctccctcccacctccatgccacctcaccctgccccatgcgagcgccactcagagcttctcgagcactcccgaagcccagctcccgacacaccacgctggctgcatgcaggtcccacttgcggtcacagactgtgccccatgtgctggccttcaggacttctacccggccctctccagggtgggcgccgccctttagacggacacgggcctatagaagagagaagtgcccaacagaggcaaatggcaacatctgcacggagggctaagcagacctgggagatgagtgagactttggtggaagggagtgggtggtatcaggtctgtggcccaccccctggaaggctcctctctgtcctcaaaggtcagggctgtgcttagtctggggttgccaggctaggggttctccacctggggtgggaaaggtcataatcactgtctcacacacctccccctgaggcttcgactgttgttgcttcttctggccactggatgccgcgtagacagggcctggcacacagctcaccactgcagggccccccccagggcacctggcggtgtcattggcacgatagaactccagggaacagagggagaggtgggcctccgtgcccacgcacgccaccccatgcagaccaaaggagtgttgctgccgttgggctagcagcctagggggacaggagtgaggtgcagtagggtaaaacaatgctcctgcctcttggccccacaaacatcctcccacttcatgcctccaccatgccccccacccttttgtgaccatttatctcctcttcttcccccttccatgtttccctcgggagatacatggggattgctgagtttccaggctgagggagcctcaactacccagataggaggggccttggggacctcctgcagtagaacaaccttaagagaaggatggctagtctcgacttgcctggaagaaactgttccaagtggtttcaggctgctggccctaaaggaggctgaggctaaggcctcagggaaggggaaaccaggactttccagttggaagaaatggccaggagggagtggctgacacaggaagcctgaaaagccagggcgagcaagtccttctgtgatgctgagactggaataactgaatgagtcaggatgcaaaggactaaggaagtctcccatctccatagctccgcagaggccagagactctgcaggacagattaggaggggcagatgcagcaagaacagaccagcaggtagacgcaagaaaaactgggactggcatatgcaagaatgaagatgtataaatgcaggacaggtcaaagtttgagggaataaatgaccagagaaaggagatggatgtgaacaacaaaatggcaaagacatcccaggacctgtgctgtgtaagtctttaaaaaggcagtccatgcttctgcaatttcaacgtaacagtgtcccaaagccatctgaataggataatgggactgaactatagatgctaaggcttggaaatgctgccgagatgtttgagagaatggggggacttctttatcgataccagtagaatgagaggctgcagtgaggcacgtgccagagtgaagtacactctgcccgcagagaaagggaagaaaatgaggtctggtgctggtggaacgggcctgtgaggctgatgtagtcatgcattattgcaataatgtgccctatcacttgatgtcagaggaaggatggaatatgatgacttgaagccattggctaggaagacacaggaggaggaaaagtttatacacaaaacagacaaaggaagcctggagactttacagaatacctttggaagctcaggataaatggatcctgaagatctaagagatcaggcactctcccacagtcctgtttggctgaaagtaaaagtcaaggagcccatcacaggaaaaatacatctatcttctaaacatcctcattcccgttgtctacaatgaacaaaataaaaatggcagtgtgtactttaatgtgcaggtcagggaaggctagagtgtggccatgttgggcaaagatgaccctaagctagaagggcactacaagaacatccccaaatttctgagatcctttgaaaccaccagagaagctggggaatgagggctatgaggggaccactgggtgagactagaacttgttgagaacaggaggggagaaagggatgaattatcgatacttcagtccctcttgaagttatcagggagacttttaatgtgcaaactgccttttgaagacaagttagatgtaattacaggggttggaagcttcccacttcgagttctaaaggagcccaggaggaaaattagggaactgggagcctaattgtggaaaatgagccagagaggcaggggctgtcaatctgactgcattcctggtaaaggttccaaaggggacgctgagtttccctccatctcgagtaagctggtagcacttatttttaacaactaatcaaataaagcatttgatttgggaacactgatcctttaggcaaatgtaacctcttacaggagacgcaagtatggcgtctgaaagagaaaagcaccatgttgtctcctggaactcagcaggggaagataagtaaacatgtggaacgaggtagtcagtgagtgaaaaaacaaatcctaggacaagcatcattcctgagaccaaggtaaggaccagtcttgcgtaacacttcagtaaatgccctggaaggtgatttctaagagctgctgctgctcctcctcttggtcagctctttcagccacaaaggcctcctggaccccctccctccctggccacagccgagtaactccatgctccctctcctttccacccaacctgaattttatttacctcttgtgtggccccctgaccactcggggtttgggtttgactttaagcttggtgattggtccgcaaaaaggagaaggaagttggtagaggtagtggttacatatgtggcgcaggaaaggtacagggttatttttctgtttctgggaaagaccctttgtgggcagcatggggatgggaaaaatgaagattttccgcatccaccgtctgctgaacaccattgaactgcatttcaggaactcatgctgctctctggattcagcaacagtaatgggaaatctagcgatgtcaatccaggtgggggagttgggaaggggagaagggaagaggaaaggtggagaggggagagaatgggaatgtgggtgaactaagggaggtgatggagggggcaggaaggaggaagaatgaaggtggctgaggctggaatccaagctatttggggtaggtgtaaagatgggaggcttctcagccactcctacattacttcctccttgtgttccctaagatcaaagcttgcccatccccatgcctgctcccttcacctccctgcaggaaaagccattttcctcacatccctaatccatcagcttgggttctgggatggacatggatggctgccatccatccatccacctcctggggccgcagggcgagcaggaggtcccggggctcttgccccataccttccaaggggcttggggtgtcgggctgagaccttggccgctcgcttcctcaactttctgtgaggataagacaacagtagtcagggttagtgtagaaccaagtggaaaagctggtgcaactaggaccaggggcaagatttctcttctagcagtccgaaggcttcctggtggcaggatattataacagcagacactcctgagacccgagctttcttttttcttttttttgtatttttagtagagatggggtttcactatgttggctaggctggtctcgaactcctgaccttgtgatccacccgtcttggcctcccaaagtgttgggattacaggcgtgagccaccgcacctggctgagacccaagctttcatagctgcttggcctcttcagcacatgaccaggtgggtgagcagaagtgaaggccgtggactcaggacggtgcccccatgccagcaccctcagaaattagctagggcagatggcaagtaaggactcctgagtccagatgttagtgctaaacctcagtggagggctaaggggagcatcgttaggattgttaagattgccagactgaccaggctaggcggcagaactagcctgagtcaggcctagggaggctactgtgtctttttttcctggatgctctctttgagaaagactctggcattgttcaggcctgaggccgctggaccaggaccaagaaccaaggccgaatatccaagggcgttaacttggtttgactggggaacacaggccaggctccttacaatgacaccacccttcctgctgaagttccaatcccatatgctgtggtcattcacaaactgagttcatctcccaaacttacttccagggaaataaataatttttccttttttttttttttggtctttgagacagggttactctgtcacccaggctgcagtgagccatggtgcaaccatggctcactgcagccttatctcctgggctcaagtgattctcccacctcagccttctgaatcgctgggaccacaggtgtgcaccatcatgactggctaatatttgttagaagcagggtctcactatgttgtccaggctggtctcatctcaaacttctgagcccaagctatcctcctgccttggcctcccaaagtgctgggataacaggcatgagccactgagcccagccttagttgtcctttctttgaacatgttcctgctccgctgtttctcttgaggagtcatatttcaacatagtacagctggccttccatatccatgggctctgcatctgtagattcaacctccatctgtactgaacacgtaccaactttttttcttgtcattattccctaagcaataaaatataacaactacttatgtagcatttacattatgttaggtattataagtaatctagagatgatttaaagcatacagaggatgtgcataggttatatgcaaatactatagcattttatatcagggacttgagcatctttgaattgtggtatccttgggagatcctagaaccaatcccccatggttactgagggatgactgtttaatgtgtgaagacaccttgggatttaaatatacgtatatattttaaaccagtcagaagctgtttgatattttctgcctcagcttcttcctgaggatgtacttagttggtctctttgccaaagtgtccaaagtgttggacattcctggcaaagaatatacaactctcaggtccctttactgagacattgctaatagttagactctttcatcttataaatatggtgtgaaattttttctccaaatgtctttttctcaaacatgtctaaaatgtctaaaatgaaatacacttggcctcttcaccaatcaacctggagagttcaccttgatctccagagtagtactaaaacattttggtattatctagaaatttagaagtacctcttctctaaattatttaaggaccttatatcaacaggtctttgtattatttatatatatatatacacaaacatatgtaatcttatttcatatttatataaaagagtttagacccttttatcttataaatattttatatataaaattatatataagttatgttaaggactttgtcctcattgaggaccagtgctgttatttgtcttgatttaaatttcttcattcacagatgtgtttgtttccacctaccatttgttccttccttcagccatcaaacataaaaacctatgtaggccaggggcagcggcttacgcctgtaatcccagcactttgggaggctgaggcaggaggactgcttgagcccagaagtttgagaccagcctgggcaacacagtgagacctcgtctctacaaaaaatttaaaaattagccgggtgtggtggctcgagcctgtagttccagctactcaggaggctgagatgggatgatcgcttgagcccaagaggtcgaggttgcagtgagccatgatggcgccactgcactctggcctggtcaacatagagagaccctgtctcaaaaacaaggaatcaaacaaacaaacaaacaaacaaagaaaaaacccaaaacaaaaacctgtctacatttgcatatcctcttctcatacctttcaactatttttcttctctaagtctactgtacctaaatgtttctaaattccatctcttacaatttttctcagtcctgcataccatttctttttctcaactgaatccttttaaacattcaaatcactcctacacatgcacacacacacacacacacacaccctctacttatctctcctccccttcacagtaacatttctcaagagctgtccatacttatcatctttatatcctctcttcctactttttttttttttttttgagacagagtctcgatctgtcactcaggctggagtgcagtggtgcaatcttggctcactgcaacctccgcctcctgggctcagcaattctcctgcctcagcctcccaggtagctgggattacaggcacgcaccaccacagccagctaatttttgtatttttagtagagacggagtttcatcatgttggccaggctggtctcaaactcctgatctcaggtgattcacctgccttggcctcccaaagtgctgggattacaggtgtgagccaccatgcccagcctcctcttactcatttttcaacccacttcctctggttttccctacctatcactctgcaaacttctattttgttaaatccagcagacatttttcagtcttcatcttaatgacctctctgcaacatctgactgtcctctctttccttggctgctataacactacaatatcctggttttattcctaattctgcttattattattattaatttccagagtggctccccagggagcagggctgactcctaggcagtgtgcctagagccgcctactcctaattctggttgctctttcttggtcttctctgcaggctcctcccctatctggtcattaaaatttgtggagctctttcttaggcattttgttctcacttcatatagggccctctatatggtctaattcacacctagtgtattcataatcttgtctatttcattgccttcttgatgtttctaggtagagatctgaaagtaatctgaaatgtaatgtaggtccaaaaaaaaaagataattatctcagtaaaatccactccagaaacctaggggtcaatcctgacttctccctttcttggatcccaaagtcaatcaataaccaagtcctgtcaattttacttctaaatatctctccaatccatatcttttgctcctctcctgattattctcagaaatagagtcaaaggcggggcgtggtggctcatagctgtaatcccagcactttgggaggccaggacaggcagatcacttgatctgatcctgaggtcaggagatcaagaccagcctgggcaacatggagaaaccccatctttactaaaaatacccaaaaatcagcaaattagctgggcatggtggcgcgtgcccgtaatcccagctactcgagaggctgaggtaggagaattgcttgaacccaggaggcggaggttgcagtgaaccaagattgcaccagtacactccagcctgggtgacaaagcaaggctctgtctcaaaaaaaaaaaaaaaaaaaaaaagaaaagaaaagaaaaaaaagaaatagattcaaatgatcttttggagtcacaaacctgatcatgccatctcatagccctccccattaaaacacttcaatggccgggcacggtggctcaagcctgtaagcccagcactttgggaggccgaggtaggcggatcacctgaggtcaggagttcaagaccagcctggcgagcatggtgaaacctcgtctctactaaaaatacaaaaattagctgggcgtggtgggcacctgtagacctagccactcaggaggctgaagcagaagaatcacttgaacccagggaggtggaggttgcagtgagcagagattgtgccactgcactccagcctgggcaacaagccagactccctctcaaaaaaacaaacaaacaaaacaaacaaacaaacaatccaaacatcaaaggcttcccaatccttttatcataaggacctgaatccttatgatggcctataaggtcttctatgatctgcagcctaataacctctcttgtcatttattcacctttgtattctcagcaccttgcacagtacttggcaaataggagttcaataaacatctgtcaagctgaaatgaactagaagagtgacttcttaaatagcactgaagctcttagagcctcaatttcattacctgtaaaagagtagtaaatagttcaattatctgtacattcttttcttattctaaagttctacaacttttacatgttctagggtagaactaccaaaacaaattgaaaaatgattaatacatcaggttttgattttctcattccctaaatcttactgacttcctctaaaagccagcagatccattttttttccctaaggaggggagagttgtttacaactgtcttgcctatctttcataattgtaataattgtatcacctgtgagaatgctccctctgctgggcctgacctgtgaaggatctagatcatagccccatcacagaatctcccagggctcccgcaatctctttccccacgaagaatggcctctgtgctttagtgtatctctttctccagcctttatatcccagacttagtatgagattccgatatgtccaacaaatattcctgatccctaaaacttatttcagctttgcatacctggggacaattcctgtgtctcaaactttccaaggacagcccatctctaaagctagttcatattaacctgaagcccagagatggctgctggtaccatccttctctcaggcagcatcggaatcattttaggtgtctgttctctcattctctatgttctatcagtcatcctacatctattcattttcctccatctttgtttttaccctcctgataagcttcaattttagaacaaactcctgactggtcttactgcatcaagaccctcctctcctcatccactactatcaggcaaactttcaaaaacactggctttattcttgtcccatataaatacctttatttgtaatttttctataaggcaaaggccaaactctccaatttggcacctaaagcattccattttctggcctccctttatccagatcttccactatttctcagtataaacctactcttgctaacttactgtcttccaaatataaaccattcattatcatctctgttggggccaacagtgactttactgttgctaaatccagcatttgtttctcagtcctcatgtttttaggtctgggcagcactgacttagctggtcactctctcctcttcgaagcactttacttggctcccaggccaccacactcccctggttttcttcctacctcacctcactgtttgcattcatcttatcttctgacttttaaatatttagtctccccaaggttcagtctctgggcctctctctgtcttttaaatttacattcacttccttggtatgttgtccagtttcaggactttatatgttttactcaactgaactccagagtcctatattaaattacctaacttagcctcgccacttcaatgtcttaaagaatcttaaatttaacaggtctaaaaccaagttcctaccctccacccccaagcccatctcccaacaaaacatgctccattcactgttttccttgtcaggtgaggccaatttcttacttagctgaggccaaaaacctggagagagccttaactcctctctctcacatcacactgaatccatcagcaagtcctatagctctgccttcaactgtctgtaaatcttgatcatttttcaccactttcactggtcaccatcacctttcactttctttacgtggctttcagaagacaataaccccataaccagccacctgacttcttgcttctactgcatcccttacaatctattcctaataaagcagtgaaagtagtactgaaaaaaaaatggaagcccgatgtcacacctctgctccaagccctccagtggttccttatctcccacagaacaaaagccatcctctcccagatggcccgcaggatctggcttcccattcttttccgaagaccacctacactgcatctcctaccattttcttctttttcactcagctccagccacagtggcctccaggagaaggagaggccttatcccatcacccactacatacacacacaggcacacacacaccccagaatattttcatttttgatccctcttcctagaaatgtttatctagaggtctgcatagcttgtgccctcacctcctttaaatcttttctcaaatgatgccttctccaagaggccttccttcaccacttatttatttacttacttacttaatttatttttattttatttttatttgagacggagtttcgctcttgttgcccaggctggagtgcaatggcgcgatctcagctcaccgcaacctccgcctcccgggttcaagccattctcccgcctcagcctcccgagtagctgggattacagtcatgcgccaccacacccggctagttttgtatttttagtagagatggggtttctccatgttggtcaggctggtctcgaactcctgacctcaggtgatccgcgcctcgacctcccaaagtgctgggattacaggtgtgagccaccgtgcccggccttagttaatttattttttgagacagggtcttgctctgccacccaggcagtgtagtggcatgatcacagctcactgcagccttgacttcctgggctcaagcaatcttcccacctcagcctcccaagtagctgggactacaggcacgcaccaccatgttcagctaattttatttttaaaaaattatctgtagagacagggtctcattatgttgcccaggctggtctcgaattcttgggctcaaataatgcttccaccgtggcctcccaaagtcctgggattataggcatgagccacgggtagtgtctacaacagtacctggcacatagtaagatctcagtaaataaatattgggtgagtggatctctacacctttgttcacgctatcttcttcactggaaatgtctaaattctacgcatctttcagaacatggggtttaaattagggaaggtaagcagcacagagaaggaaatgcagccccaagatggatgaaagtaaagaggcacagcacgtttgttttaaagtggtttgagtgtccaggccagataaagtaccgaaagtcctcagtactgaaagacatttcagatgagcctcagagccaaggcaaagaaagtgtgagcaggtatagaaaagactggagactggataatatcctgactttcaaaagaaaaaaaaaaaaggagaaaaaggattcctcaattcctcaatctacacataagtaatattctagaataaattattaaatagaagtttgtaagcatttaggaaaaaataaggtgattcttagagacctaaaaggatttcagtaaaaatagactcaaactactatgattttcttttttgacaggattactaaattggaaggctggagaatggctgtgaacatagcatatctggattttatcaaaaactaacagaatctcccatgatttcattacagataagaaatatatagatagataaggtgaaatgttggttacatcattgaagtgttctgtttcttcccagttggtggaaggaacatattttacagctgatgattagaagcttgatgaaaatctacaggaacattttgcaagaagagttagactttggttttaaacatttccacaacaacttttagccatttggatgaagccagaaggcaaagctgccatgtctgttcagcagaggaggctgaggggaaatgacagatggaaagtcacatcaggactcaagataatctcatgggatcatcatggcttttttatggcttctaaattatgtatcaaaacaaatgtaataggtaaacgtcacctatacctgggttggaaaaggctgctctatcagtaggaagcatagggaagacctgaactggttttaagtgatgacaagttcagtataagcagtgggaagctgccgcagtaggaagacagtgtaatccgagcacgcttcagtcggggttgaggatttctacagtagctggcggcatcagaccccatctgaagtagtgtgcccgcggaaacctatccggacatcaagaggcctttcagcaatactgatctagggaaccactgaagaaagggaggatttttggctcgcaaaatagattacagtgagagggtgtaaagatttccaaataaatgcctggctgtcaatggcagtttctcaaaaagatcaaagtagatgttccagggaagggagacgttaagcacaggcagtttccagggtgatgcgtttccctggaagccggactggaccccagggctccagcgcaggtggagaggttgggcctcgccaaaagagatcctgggaaacttccaggacttccaggagccccgagggctcgagcgttcacatacgcgccccgccccggggcggcccgggcagagagactggcgcggtctctcctggcgcccttcggccatcgcgcgccgccgtccccgggcccccggaccctgggcgcccagcctgcgcgggacacacccaggcgccgcctcccaggggcggccgcgtccttactgaactcggaaatcgctggccggcagcgccagcgctggaatcgcccccgcgcctgggagtggcctcgcgaggccggcgcgcgccccggggccgaggaatccgcctgcccgcccaggcgtcggccacgagagagcgggagcctcgctggtccccatttcaggtactcccttggggcacctttcgtggtcccacaagatttcccaactctccagctttgcaacggcctccatattttcccgcgcgtcccgacccccgggtcctcccgtgccccggacctgctcagatgtctcccaaggctattcatcagggagcaccccaatcccggcctgctccgcccggcgcccgcggcccctcacctgtagaaggccgcgttgaccctcttttcgctggggaagcccagcatcccgcagaccacgtggctgttgtgggcgctccagcctttgtcgcacacttgcgaccagccgtcaggaagcctgacttccaccagcccctccgtcacgggcaggggtcgtctgccccacccaacggcgggtcgaattcgcacctcctccacttgcaggtgatgctctacctgggggcggggccacaagcagggaaagaatcccagtggcacctttcatgtgtcccgccgcccttaaggaaccctgcttggtgtgcctgctgtaaacccagtggcgggatgggcccgaggcggcgctgagagagcggccacgatggccgcagtccgcggtgtggactctcttgcagccagcagcgcgtgggatgtgctgtgctcccagagaggattcagggcactaggaaggaggccctccctgtgcctggagcaggagggagcacttcaaaaaggaaatggctttgaaggaggagaaagtcagaaggaagatgtctcaggaaagcaggaacatttgaggagaaggagagcaccaggtgccccaggggtgactagggatgaagctggagaggctcatgccaggtttagccccttgaatgtgaatgctaaaaacctgttggattttacagcatctgggagctctatcatttgcttttccaagtctcccaccaatccaaatgatcccccaggggtaactaccttctaatgtctccgctaaccaccccacagtactctcggctatcctgggtagtgtgtgtgtgtatgtctaggaaatgcagacctcaatgacattggagtccgagaagccagggaggcgctggtctttgcagatgaccccagcatcctcatcgtgcgtacagtcactgttcccccagccccgggaggcacattcagtcacactctgctcggtcccactgcagctcaagttgtccagccagatgcggcctgtggaaggggagatgaagggacagagaagcttggggagggaggatgggggagtaatggggatgtagggaagagtgagtgctgaggcctcccacttggccatgatgatcccatctttctggtatgataaggggtggagacgggacaggggaccctggcagggaataggaagggggcataagattgagggaaaattggtgtgatctggggatactcaagaacctgatacggtgaataaaaaaccaagaatcaaccctgaagttctgatcagtctctacccattcattgatagctacaattaatcaggtacctactgtgtgccaggtgctctgccatggtgtgcacatatgtgatcattcttagaacagagctgccagaacactgttttatataaagaaactggggtttagagaagctgagcaacttgcttaagaccataaagccaatacgtgggggcttaggagtttgatctatctgtgaggcttggatgtctaagatcctttcttcacatccttgcattctctcttgtgcccgccctgtctgtgctgccatatagccccttgttcttctctctgtctgaaacctgttttttttttttttttgaaacgaagtcttgccctgttgcctaggctgaaatgcagtggcatgatctcagctcactgcaacctctgtctcccaggttcaagcaattctcctgccttagcctcccaagtagctggggctacaagcatgtgccaccatacctggctaatttttgtatttgtagtagagacagggtttcaaccatgttggccaggctggtctcgaactcctgacctcaggtgatccacccacctcagcctcccaaagtgctgggattataggcgtgagccactgagcccggcctgaaccctgtggagtatcactggcttcctctcagaattgggcgcagcctcaaaggtcatctgtcctagccaatgttcaaggacatctcattcacatcccaacaggacttacccagttgttgcggagacacctagctcctgccccaccagactgtgtaaccatcaaagtccttgtgactcttcatgactttcccctaccacatctgattcattcctttggtgccaaccagaaaaatccttcagccacacgactgtccttcccatatttaaaaacaaccattacgccattgctatgcaaggtttttactttccatatcaatcccctgattcttcagcaattcctccttgaaacttggcttctgaatctttcacatctaggcagctctcctctgaaagtatttccattttctactgtccctcttaaaacacagcatctacaaatgacacttaattccacaggtggtctagccagtgggaactggggaatcagctgcaggttgcacctgcttctgtccatcattcccactgtgggttcataccatgggcacagtcctaggcctcacctagggaactgctcttaagcctccaccacccacactcatacttgtcctagattttatacttgtccttagacagtaccaccttgttagttttagctctggcccataacctgattttgttagctgcagtgtctgtgaccccttgtgactttgggacatccagatatcatttacctgctcttagcgtcccatgagactaactgtactttatttgtacagggctcacctgtatctgggctgttttgtggatggctttgtaggatcatacttttgcagcagaaaagaacttagacatcatctagtcattttgcatacagggcatctgaggctcagagaaagcactgactagcctaaggtcacacagctctgggaagtaactatgttgcttggtttgtcatccatggatttactcaatgctggctgttcttggtgtcgtgtgtccctatggctgtgccatcctcgtgttccctttccctgcactttggccacacataggaaatatctaggatatgcctggatcattgctcacctgttccagggccatatttggcactgtgggtccagcctgtggcctctgtgaagcccagctcccggcagaggatgtgggcagcctgcagcgtgaagtcatcatcgcagatggtgccccattcaccagctcgctgtatctccacgcggccctcgtagggcttcctggggaagccagccagccggaaccgaagcccctggctcccggccttcttctcagggcccgtggaaggggacggagaccccaagcacgaactgcacagcaggcacagcagcagcccccaggggctccactgccagacactgacaggtcgcatggcagggaaggcctgggtgccccagagacaaagtgtgcgtgagagaaacagattgagtggggcccagagtcagaaagagagggagaagtcacgaaagaaaaacagacactgagtaagacagagacagcgagagacaacaggagagaaagagccccagggaccaagagacagggagagaaacacattaaataagggctgaggcacaggtcatagaggcacagcctgagagacccagagataagagacaactatgagagatcgagagtcagagaagggtcaataaaaagagatagagactgagcaagagacacgtagagagagaggaagacccagacagacaggatgtgagaggaagggagactgtgggaatgagagagagaaaaccagaaagacacagaggagagagacaacggatagaaagtgataggcaaagaactaagcactcagtataggggaaccaagcacaccgcgggtgagaaggagagggattgacaagagccaaggggcggacgtgggagggatccagatgaccccatttactcagagggaggacagacagctgtactgattgtgcagagaggcacgtaaggggccctaggcggccctgggatcacagatcccctgaatgggagcccagagtcctaacccagcagattcccaggcagggaaggctggcaccaaagctcgcctggagaacctgctgcacgccctccccaacacgcaggctctcagatgccctgcagggtcaagaggcccaggagggccaggcctcaaggctgggcgggggatggggtagggttgtcccagcctcctgccaacaccaccatccctgtcaccgggcaacgggaggccaggcgctatggctcctcagccaaggccttctctgcctagggctgagaacagcccctctacagcaagcccccgtcaacatgcttcccccaacccaaacaatcaatccaacaaggcagctttgttctgggttggggacccaggggcagcgcctcccggaggagccccctcccttagggcgctcctggcggccctgttcgaacacccgtagcccccgcctccggtatgtgcctcctccgtgtactctgtctcacttgccctttgacaagaatcaaactctcagttgggtggcttcccctcgactccatcccacaccacccgttttccctggtccctccacatcctctccatcccctactcattccctctgcggttagcgtgactccccctaccttggccgagcaggaccctaagggctgggagaagagtgctggtcctggagatcagtcctaggacttccaaaaaaaaaaaaaaatgctcggccaggggagactggacccccctctctcccccttctccgttcgtccctcccacatccccctgagccctcccacattccgccttctccttccattcctcccggccagttccctcctctcctcctctgggtcctccctccccgtggagctggccactgccgcgccccctccccctccctggccctcccggctcgttcaatgaagctttctcttcccgcggcatggaggccaggcctctgcggtcagggagctgacatgcaagcggcggccgggcggcggggcggccccggtggtggcgggaagcggttcaaccccagccctccctccgagtcccgggccagcggagtctaaacagcccggctcgggcggggctgggggcgggcccggccagggtaaataaagccccggaggcccgtgtgggtctctccggtgcccggggcgctttcggggtgatgtcatggctttcactctgacgtcaccttgggcatatgacgtcacgcgcagccaccacgcccagaggccagggccctcgcgccaaaaccgaggactttcggtggagccactggcgcgcccccacgacggcgggtaggggcctggggtgctgcagctcccggctaatccgggggtctccaccattccttctcgctcctctccctcaccccaccgcgacccccccagcggctgccggcgggggccggggaggggcggaaactcctccagggaacccggccccgcctcccgccccgcctcccgccgcagggccaggaagcgcggaaggaaccgccgggggccatggacggagcagtgatggaagggccgctttttttgcagagtcagcgctttgggaccaaggtagtctggcgcatggatgccgaaccttatccgggctagtagtgggtgagagagcccagaaacagggagaggtgggcagcgggctggagagcggcgccgggagttggagagcctgtgactttcccgtgaagttgctttgcacactcccgggaagcgtctgtagtctaggggttctggtcctggggagacggagtggcatcgtccttgggaaacttcgcccccaaccccgtttggaagccccagatcccaaatcgacttgcgccgcaacctccttccccgtcgggacccgggccgcctgcgcacgccactccctctcgagcactctctctctctccctagaggtggaggaagacctgggccgtgctctacccggccagtccccacggcgtagcgcggctcgagttctttgaccataaggggtcgagctctgggggtggccgagggagctcgcgccgcctggactgcaaagtgatccgtctggctgagtgtgtgagtgtggcccccgtcaccgtggagaccccccctgagcccggcgccactgccttccgcctggacactgctcagcgctcgcacctgctggcggccgacgcgccgtccagtgcagcctgggtgcagacgctg

SEQ ID NO: 338 - DNA, 65534 bp, Homo sapiens
  source 1..65534: mol_type = genomic DNA
tggtagatggtgaactttgaaacttaagtttttcatgtcagagaatgtccagatgggtttgtggctgtaccagagaaaccattagtggcgaggaagactcatgggtctctactgtttctggggaaggtaaaagcacctgtgttgggtggtgtgagtacagcactgtgttggaagatgtctgagtgtgtgacttacttgtggacacagagcagctatgggtgggcagtgctggtccttcactaccccgtttgccctcagccccacttctcacattcccgagctctgcttcatggcccagggggcctctcctcccagccagcttctggttaggatcagcatacggcagcagcaggtgcagctgtgtcaactcttgcgtgaacaccgggggtgggtttgctttttcctgagggtcccaccttcatttctcctggctccaatgctgagtggagaactgaacacacagaagcagaggcatgttcgatgacaaacacgtgtgctgcaaaccacacgagttaccctgctgtgcacctccctgggtgcacccgccgggcacggccaccctgcccacagccggcacctggagccagacgctcctccttctcggtctcacaccagccgcatcttagcagcagctgccccatccagtgctgatgtgagatgtgcagatctagtttttgttttaacccttgctttacttgaaaacttggacatattcaatcaatttcaacggcagtattcatgtattaaaaatggcagatgcatacaagcatgaagaagtaaaaattgctgttgcttgaaataatgtcattttggtgcacattctctctcactgagtgaggtcagactgcacagctccctggtagcccatgtctgagacttaccttcctgaacaacgtaacgattcatttttcaccctcccagtatcccccataattgtacacagggaaatgagtggtggtggatggtgaactttgaaacttcgtttttcaaagtattaaaaaggagaaacacctgcagattggccatttgcaggcttttctccttaagtttttcttccatccttgacgctggtggagacacaatcttgattcttcacgtgcagttttggagagtgtaacaggtgagctcggtcttttacctctagttccaaaccttttactgactcagtaggactaaatgccagatccatttttctctctgcttgacaaaacacgcttaaggtgcatgtgcttaaaattgagaaattacgtaagtcaacccaccaggcaggcagccagccatccatgtttcaactctgtaagatgtctgctactgtccgcaaaataccagaacactccggagcgtccctttgccaccaagacagctttttctacagaatttcaattcttgtgttttccaaacatgctagaaccacaccaagaaaatctcatctggattggctctcctctcacaatgcctgttgttgtctttctaataaagaaccacacaaaacaacatcattcccaagtatagactttatgttttacttattccattgaaaatcccaagttccttcatggcaaccctccctctgccctcacaccccagcaggtccccgcaggccagggcccatgccccacctgcccacgggtctggcccccaggccaccaggggcccgctgcgtcctgtctcacacacaaggggtttaactcaacgctatgtacattcacagttccgaatatccgccaactctaagtcgccacgaagagaaaagagaatcaggaggaacaaacatccattcaaagtctgtttatcagagatttttttttctgaaaatgcacagtggcatttcattcaaaaaacccttcatctgcagacctgcggaagggaggtggcctgggtcccttccctcggaatatcttagtttatttacctccttcattggccatttgcaggctcttctccttgaaaaatgaatctttacgcattctccaattataaaatcagtgactgttagctaccaaaggctgcactaggatttcttctgtgtccaacacgccaagagccctgaaattgacttcggtttactccatccctgtctgtcctgctggcagtgtccatgctaaaaaacaagtcgaggtgattgattgaaacggagctgaaggttgtttttaaatgtctgtcagtggagaaacgcgtatcacgaatctctgaggaagttagtaaacattttttcccgtacttactggccttggtggtcactttctatagagatgccccaaatataaaaatcaattcatttcagaaatcaaaaaaattttccaaacaaacccggagcctttgctttaggaagcaaactcaagtctgtgatgattattgtgcttgaaggatgggtttctaattctgtcataaaaaatgatgaaacaaggtgatgtcagagggacttcaggtgacaccaaaataccccatccagggcctggaagcccctctgcctttgactctaagatggggcaggacccccgctctcagtgggatgtgcccgcgaccctggcgctgggaggcagtgctgcagagaggagtggtgtccgcacggctgtcaccagacatcctcatcaccctccgcaccgcacagcccagcgtctccttccacaagcaaaagactgcggctcctctctctgcaggaaggtcagccatactcgggtggcagcgtgacgccagtcaccatggaaaccagggctgacaggaagatgcagccgcttccagcagggacctggcctgagggcaagggaggagcggcacggcggcggctgccttgcgcttccagctcgggccctgctcatttgaacaatatccaacctcggactggagtttaggctacagtgaaatggattacgttatgccgaaacagaaacatcaaactgccaacgtttataaaaaaagaggggactggaaaaggattaagaaaagcagaaaaagtgttttggggctaggcccttgagttcacacctccccaggggacccagcggaaggagagggattacctgctggagagaggcctgatggaaatttaagtcaaagcccaaacagcctcagattctatattaaaaaaaaaaaggcctataaataaatatcctttgactctaaaaggaaaaatgaagtagaaaaacaattttcattttttaaaaaatgctgcatgtttcctgaagtacctaaatggagtttataaaatactcatgagctccagcacacaggtagaaacactgaaaaatcaggtgacggctcggctctgccaggctgtggatccacagaggcagacaggtttcgtgccagagtgacacgcaagcgcacgctgtgtggcaggcgtgtgctgagtgtgcacggaggcccgcccggtgcacgctgccgccggaagaggctgtgacagagactcgaaaccagggccccgtgggagaacacggggcggcaccggtgccccccgcccggcagggaacctgaccccacggggtccaggccaggcgggggatccgcgtgcgcgccctccgattctcgcacagtaagcgtcggttctgcaacacacttcacaaaggaacaagatacaaacagcccccgaggcccctggaactcgggctgaagacagtgcctgtacagcaggagtgaggagcggagcccagaggtcactcgcaaagaggctcatggcggtgatgtccacgcgggaggggccgcgtctctccgcaaccctgggtcctaatccagcttcttgcgaacaggcttccgcccagcgtctgagttttccgggctgaaatcggcacagaagccgtttgggattggcgcaggtgaggtctctgcacagctttcgaaatgtgtctgatccgggtacaggtattcctctgcgaaggcagggtacatttctgcaaacctgtggaagtcagctggaaagacaaaggcacctgtggttatggaatggggacgagcaaatgtctaggatttggaggctcttttcccacggccctggtgggtgtccacctcacgccctccagggagggttagaatcgtctgtgaaacggatgctttcagggtggagagaagaacttgcgcttactttctttgcagcgcacgaagtcaccctgacaaccggggcaggctgggtgtcctcctagctactcctgcttttgggaaaccctacagaaagcttctggttttgaattcgacagatatatcccggggacttagcacttctgaggcactgtaaccagagaagctggctcagggacaagaccaagtgtctggacagtgatctggcgctctgagggggtgccctcgtccaccctgggagacccggtaggcagggggccgtcctcacagagcctcggactgcacttcctggccgctgtgcctggctctcatgtgagcgccctcggctcctactgatggcgccatggaggcttctggtggggctggaaagatggtgcagggggctggtcatgctaggccgctccagaaacactcagaacctgggccacccggcgagaaatccagggatggttgttactggaaattgcagctggtcggtgcccactacaaacatcaaagagcccgaacacaccaaggagcattgcacactttcaaaatggaaacaagcgcacgcatgcacacatgcaaacacacacacacggtaaccaaacacacatgtgcgcacacacacaaaacaagcacacacacggtaaccacacatgcgtgcacacacacacacacaaaagcacgcacacacacggtaaacaaacacatgcgtgcacacacacaaagagcacacacggtaaacacacatgcacgcagacacacacacacaaaacaagcacacacacggtaaccaaacacacgtgcgcgcacacacacaaaacaagcacacacacggtaatcacacatgcacgtacacacaagtgtgtgcacacacagtaaacacatgcgtgtacacacaaacaagtgcacacacacactaactaaacacacatgcgtgcacacacaaaacaagcacatgcacacacatggtaactacacacatgcacgcacacatacaaaacaagtgcaggcacacaataacatgcacacacacaaaacaagcgcaggcacactaaacacacatgcgcacgcacaagtgcacgcacacacacggtaacacacatgcgcatgcacacatggtaaccacacacatgcacacacacacaaaacaagcgcaggcacacgcggtaactaaacatgcatgcacacacacaaaacaagcgcacgcgcacacagtaactaaacacacatgcgtgcacacacacaaaacaagcacacgcacacagcaactaaacacacatgcccatgcacacacacacacgcacggtactaaacacatgtgcgcgcacacacaaaacaagcgcaggcacacagtaactaaacacacatgcgcacgcacaagtgcacgaacacacacggtaacacacatgcgcatgcacacatggtaactacacacatgcacacacacacaaaacaagcgcaggtacacacagtaactaaacatgcatgcacacacaaaacaagcgcatgcgcacacagtaaacacgtgtgcacacacacaaaacaagcacacgcacacagcaactaaacacacatgcccatgcacacacacaagtgcacgcacacacacgcacggtactaaacacgtgcgcacacacacaaaacaagcacaagagcacagacacggtaactaaacacgtgcgctttcaaaatggaaacaagcatgcacatgcacgcacacacacaacacacatgcacgctttcaatactgaaacaagcatgcacatgtgtacacaaacgtgtgcacacacggtaaacatgcacactttcaatactaaaagaagcacgcacatgcgtgcacacacgtatgcacacgcacggtaacacacgtgcactttcagtactgaaacaaacgcacacaggcgcacacgcacacacacgtgtgcacacacacggtaactaagcacacatacatgctttcaatactgaaaccagtgcgcacatccgcactcccgcctccggctcccgcacagacgctgtgcacgcagctctctcgcgtgtcttctcgtttgctctaagaccacccttccaggtggggattgcggcatccactgggatgagccaggccagggcctgcagccctgggagcctcgggtggatgcagcgtagctcattcacactgcaggggagggaggcgccccgggctcgggtttgcggattttgcacagcaatttaaaaatatcaaccgccattaccgacagctcgtgctctggaatcagccgtgttaccagtcacctcatcagatgtccacagacaggtgacttttctcgggaggaagtcgccctgggcggcacgggggtctgcagcgcccgcctcctcgtctctcctgacagacccctcccaggagaggggggatgtgagccacaccccggctggcagtgacaaagcccacagccagtggcctcgagggctgggtgcgggtatcccccacctccaggcacctgaatcccagcctgaggccatggaaggctcagagcttcggaactgggcttggagtttggttgtataaatcgccaaaacaaatcagattggaaagctccctacgaacgctgccaggtctccagaaccttccttctcaggggtttctttgttacacagggcagcctggtgaatggaggcatggcggggactccactcctgtcctgggctcccacggagactcgccccacactctgtccagcccccgcccaagggtcgcgaggacgaccccactcctgcgggctcaccgaatgtgatcttccccttctcctcttggtcaatggctcggaataggtcggtcacggtgagctctgccacccccagggccgtcttgaggatgcaggacaggtcaccttcgccgacgctgccgtcctcttgcgctccgtacatctgcaaggcaaactgggtgtcaccttgcagcctcctcccctgcccaccaggccccgctgtccagggacaccccagcggccctgccccgctttgtcagagctgctgggcacctgcagggccggcggctggacacgggggactcgaacttccatgtggagccatgcagcagggccctgtgccttggatctggccccctccaggtgcctcgtggacacacagcagatgcttctcgggcaagggctcagacgctgcccaccccacccgtgatagctcagcaaaccaaccagcacctgtggctgccactgggaggccgcggaagggtcctgcctgggccacgggcgagcgcggcgcaagcttgggctgcagagttcccccacggccctctgcctccgtgagtgcaggctacagcagacgtgttcacaagcatcagtaataacatgaaaaagccctgatggttagaaatcgacagggcagatcaggagcagaaatgagaaggacctgggagggccgggagggctccagcggggagcgggaaccaggacccgggctctctcctgagcctcacaggtgacgcctcctctcttcctcctgctccaggtgtggaagcggcggctccggccctctctgtgcagggcccagtgccgaggcgcctgccgcccgctccccacaactccacggcgctcccctccctggctccacagactctgtgccctggagatcccccagaccccttgatcagggcccgcccatccctttgtccctctacctccttggaaacacttcggctccctgtggggtgcagggtcctgccccagccctttaggctcgagcctggcccacgggctctgtggcagcgctttcctctgaggtcccgacgccgcccgtgtccttccgctccaacccctgggctccctcagatgggccagctcttctacctggttcttccccgagtcctctgcctggggctgcaccatcccccgccgccctctctctgcctggggtccacggttcctggggctccgacggggccgtcgccctgactccgagtccccttctcctgctgcagcgcgctgtgatcttgtgagcgtttgctccaccctccgagaagtgggctgcctgggaggggcgtcgcctctcttcagggaggggctgcgccttcacctccaccggctcctccttgcggtgctcagggaagaaacgctgacgcctccagccttccggcctggcaagctgtccccgcgttcacaccctcttcccggggctctgcctctaccccatggaccgggtctgctccaggctctggagaccccatcctcaccctccactctccctcccctgggcctcatcccacagcgctgccgcacgcggccaccctgtcttctgtggtctacgtttctctcctgcttttagatttgctgaatcaaacatctgcagacgaaatccacgttggtgctgctggagcctcagaacgggccgggtcaaagcttcagggccacggcctccagctcctcggccgacctggatcccactcagcccccagagagcagtgcctcctgccccctagtggttgcaaggctgcttcagaggggacaacctgacatctgtgtccatttggacatgagaactgcagatgcagactttcatcctcggagcctcgtgtagatgctgcacgggaaacgcagaggtaggactgaggctaccacaggcaacagacttcaggttctcactgtccactctctgagccgctggaagttttaccagggccacatcttaaggttttacacagtaatgataacgaaaaagaacaaaaacaaggggccccaaggcgtatgaagcacatcggtgcgctgcgcatccggagtcctgagcaccggcgtgtgcctctggggtcctaggtgctaggagttctgtgtccacagtcagcctggggggcagcttcctggatctctgtgtcccaagagcagcacgctggtgcacttgccacgctctctcacacgagactgctccgtggaagcccttcctgctacatgcagtccccccaaaatgtgccaggctcccagagcagcagcaaagcacaatggccatgacttcaggaaatgatgacaccatgaaaggtataggctgcagaaagggacatggggaagcagcctgcaagaaggtgggaggaaggcagggcatatgccgtcagggcggagctgctgagggtggaggtgaggcgggaccctggtgtcgccgtggggacgcagccatatcagcggcctggaagcctgtgagaagtgatcacccatcctgcccccaggtggtcactgtagggcagcctaggcctcacccatcgcctggttcacctgagaaagacctcctagtggcacataccccaccccaagcagggacccggtgcacactgtcctccccagtgggcgtcctcaaccctaccacagccagttaccctgcccacctgcaggtggggcctgtgcaggaggaaggtcgggctccacagcccattgttcatgttgagaaacaaggcaactgccacccccaccgctgctgtcattcgttccaggttatacttggtggctctacagcaggggctggtggggccagcagaacggggggcggtggctcatgcctgtaatcccagcactttgggatgctgaggtgggcggatcacttgaggccaggagtttgagaccagcctggccaacatggtgaaaccctgtttcttctaaaattacaaaaattagctgggtttcatggcacgagcctgtaatcccagctacttgggaggctgaggcacgagaatcacttgaacctgggaggcagaggttggttgcagtgagccaagattgcaccactgcactccagcctggacaacagagcgagactccatctcacaaaaattaaaaaaaaaaaaacaacagggcacagtgaaagcagggccagcaggggccgcagggccacagggcctggctcagatcaggggccctaggaggcaggctgcccaggcctggaggaggcagggaggtcaggctttcttacacagagctgccaaatgttgaggtcatcgagttcatcctgcctggggagacccccacaagccaccttttcatgtggggacattccccagtgttgctatggagagggtgtgctggcatcagaagcaagagaagggagttcttggagcggtgagagacatgcagcttcttgactcacacatcaggcccttgagagtctggctaatgtgagtcacaccctgtgagaagccttggtaaagttgtgcctctgtacaggcaaagccggcccagctctatcccagatgaaatccacattggtgctgctggagcctcagaataggccaggccaaaccctcagggttacctggcctcccgccctccaggcctgacccagaccccactcagcccccagggagcagcgactccctgtggtgaggcaagtcctgagggcttcccaggagtctgcagctgggctgggaccccagactcccccagtggtgatgactgggctctgacatgttgtagcccctggggttagctgaggtgggcagctcctaagccgtgctttcttcaccagtccagtctgagggggagagaggacaaggtgtgtggcccctgtgttaggtgccctgtagtgtgtgatggtgtgtgacaccaccagccccacccaggtgccccaggacccaggaagaacctcagccatgctttctgatgagtgtggattgctaatccaggaagaaataaatctgggagttttctgggcattttacaaacaacagctagcataaaaagcttacgtaaaaatagcagttgggcaaatgatcaattaactgatattataaggaactagagaaatgaacaatggtgctgacgtgactgcaccgccctgtcccccagtcaaacccatgtgaactctgcactcaccttgaaagccagctggatggtgtccagggtccgggccggccggcagacgacagacagggcaaccacacactctcgcaggtccacctcgccgctgccgctctgtggggagagacgctctcagccacagctcggccgccttcggcactggagaaacgccagggtttcccatgggtgctggtgttaattaaaggccagtcccactctcactcgggaacatctgcccatgtgaaaagggaatcttggaaggacattccaccaagtgggttctccaaggtcactgtgctgtgtacacttcttggggccattacagtgacttcccaaagttcacaaggctgccacaggaagcacctcagcaaagcacacgcgatgcaatgcctgccacctgccaagacctgcatttgagaataccccctaagcaccaaggctgattctgggctctaggaatttggtctgtttatggcaacccattcatcctgcagaaagaaggtgaacccggagctgtgacgtggagctaaacagcagcccgggccagctgtggaagccagtcagccccgcgctgaccattctcagtaactcctcacacccagagtctccagggacatgctgatgtgagtgagcagggtggtgagaggcacaggtgggggctgacagggtctgcacttctgatgacgatggggacagtctgcacgtggctgcagggtgtgcccaggccacaggaaagaacctcccaggtcagggcgggaggaggtgaggagcaccctggacagggggaagactctctggtcagacagcaggagatgaagggcaaccaggagtggagggaggactccctggtcagagagcaggaggaggttccaggaagagagcagcaggagcatccaggggtagagggagggctcccaggttggagagaacaagagaaggtggggagcacacaggataggggggaggactctggccagacagcaagtgagaagcactcaggacagggggaggactctggccagagagcaggaggtgaggagcacccagaggcaaaggaaggactccctggctggagagagcaagagaagatgaggagcacccaggagaggggaagaattttggccagagagcaggaggtgaggagcacccaggacagggggaggactctggccaggcagcaggaggtgaggagcactcaggagcagagggaggacgctctggtcagagagcaggaggaagtgaggtgaggagcacccggggcagaaggactccctgatcagagagcaggagataatgagcacccaggatgggggaggactctggccagagagcaggtgaggagcacccaagggcagagggagaactctggtcagagcaggaggaggcgaggtgaggagcacccaggggcggagggaggactccctgttcagagagctgggggtgaggagcacccaggggcagagggaggactttgaccagtagttgcccctctacgcttgtgtcaaccacaggctgtaggtgctaggggtgagacgcacacaggtccctgaaggtcttctgagggaactgatagctttctttgtgctacgccacaccccttgcaaggcatggggtactgggactggggcttgggtgtctggcaggtggaaatgactacaagtccctggctctgggaaggtctcgggctgggggtctgaggtcctgggtgtaaatggagaatactcctatctcataagatcatgtgcatctgaaattgcagaaaataaaaaattaactgcacagtgtcataagttacctcggaacgctgcctgtgaaaccaggaatgctgcctgtgaaaccagtattcaccatttcacgtttcaattccaacactgtggtaaagcgcctgagtgcaaacgcagctgcagatgtggcacggacaccaggagggactcgcatccgagacgctgtttgcagctgcctcgtagtagagggcccgcggctgggggccccttacggacactaggcaggactcgcatccgagacactgtttccagctgccctgtagcagagggcccgtggctgggggcccctctggtgcgtgtgggagaatgccctgagccacgcactgtgatccttggttcacactctgcatacttgcggggcagcctccttcccctgtcctgggtgctcctcatcttctcttgctctctccaaccagggagtccttcctttgcctctgggtgctcctctctcctctctcctgctcctcctgctctctggccagagtcctccccctgtcctgagtgctcctcacctgctctctggccagagaggcctcctgccagcccgggttccacccaggactgcactgcagctgctccgtgttggtgcaaaacatatatggtgctgtcacacgggacatctcatgctgtcacgggacagtcatggctgaaggagccttctacacacaccctggcgtatcaccagctcctccaggaccacagtgtaagtgtccatgctgtgacactaacacccagaaaagaccaggattggctgacctgtggctcgccgtggcagcctgtcccgcccctgcgtgccacctcgcaccttcctaaaaccccgaggctgcccgccatgttcagggccacctggtgtgaccgtggatgcctcatcaattacgacgaggacctggggatgacgtgcggagggcagaggggagtgggcggctgcaccaggaggaagccctcccacacccacaggctggcggggagcctctaagccgatcatagaggacgggcgtgttattagaaactctgacgctgcaaagagcagctctggtgagcaggggaccctgcagggggtcccttggagaccccaggctgggtgtcacagtttgatattgttagactccgtaatcacactgaaaaaccccaaaccacaggcacattcatcagtgaagggtaatttaaacgtcaaatgtgtacgcgtatttaaaagcatggaaggaaatacctcaaaatgatagggtggggtggtgatgggtggttttccttctctgctttcaaattcatgtgaaaatatatttatattagaatgagaacaatttatgcttcaaaaagcaggaggttttgccgacaccccgctccgcaggcgacaggccctacctcgtcgaacagtgaaaacatgtcttccagcaagtcagaaacggggacttccagggaggcggcaaactccgcaatacctatcttctctcctcccttcatcctggctctttctgagtatctgtccagatctttttcaagcttttctggttttagcctagacaaaaaaagagggaaagctttctttttcaataaaatggtggcatgctaacaccagatttacttctaagactcatcaaaatattaaaattgacagaagtagcagcaagctagttttcaagaaaaggcattctcctaattggaaggtgcgagatgtgttctgtccaagtgtcaagccaggtgcctgtgcccctgagacccgttcccttcccagggcagatgtggcaggacacagggtggccctcctggggcgccgtccacagacagctgatgccagcattaagggattgaaagacactatgtgggcttaagttgatatttgaaaaaagccagaataattaataattatctcctcagttcccctccctgcaaccccaggcagcccccgccagacctcggcatcacgggttctagctaatgctcaaggaagaagaaccaggtactcacccgaggccccgcacgagcctggcaaattctaaaaggcaagtgtcagcggggagacggagctgtccttccgccagggccagctggcagtcctcgaacgtgtagtcagtcacggagacacccaaggccctacaaggagggcagcacccccgtcagcccagcctcgtggcagccagttcccaccgccccaccagaataaccgccgatggctcaggggagaggagggctgaggagaggcagtgagacaggggaagggccagttggtggggcagtcacacattcatcgatcagcttcacctctcgtgggtgctctgaaacgatgacggcagccacaccaaaggtcactgacacagactgccatcacgtgagaatcgtgaaaaagtttgaaacagcgtgagaattaccaacatgtgacgtggagacacgaagtgagctcatggtgcgagaattaccaacatgtgacccagagacgccaaagtgagctcacagtgctggaaaacggtgctaataggcttgctcaacacagggttgccacaaacgtgaagcaactgtctgtgaagcacaggatgaagcagagtgaggcgggctgtgccctcactcccagagctgctctgaccgtgccgtgtgtgctcaggtgatgagaaatcggtgcctctctagtcctagttgagagccgctgaagttccccttggcaaacttaggcatcatcatttggaacaggagagtctcaggctatccacaggaaaggacaaggcccaactgagcggctgcctgtgaagctcacagcagtcctggccccgccacgtgtgactccaggtgagccagggaccaggagccctggctgggagaaccacccacctccgccagccacacctggggccatccccggcctctcctgatggcccgtcctgggtggcacctctctccaggccagcactgcacacgtgccattcaactcagaaccccaaatgactcagaggcgagccccatcccagatgaaaaccaaggtcgaggaaggatgtgtgcgctctgccaccctggggtgccaccatccttgcagcgggcaggggaggagaacgtgcttccaacactgcctcctaggacccactacgggagtgggaaaccagccgggaggaggcgctgccagggtccctctgctcatgatcaactccactccccgagtggggctgcacggccccgcccaggcccaggagtccgaggctgcttctccctcccatctccactccgagtggggctgcacggccccgcccaggcccaggagtccgaggctgcttctccctcccatctccactccgagtggggctgcacaggccccgcccaggcccaggagtccgaggctgcttctccctcccatgttccttggtggggggttttgctgacggtggcagaccctccaacggccctgatgtgatgaaacatggttcccggtaatttggagtggggttttaagagaattctgaattactacaatggaaatggcagcactctcgtaccctaaaaaaagtacaagttcctcggagtctgtttgaaatggagggttctaaaataatcagtgaggcccacaggcgatctctccttgagcgctgtaaaatctgttctcttcctcctaagtccccaaaagtagccagtattggcagcagtccggagcacaggtgctgggcttggaggtgggaatgcattcccctggctcggcgcctactcagctttttgtattgttcagagctgcctgtggtgggggttgagtggagctttgcgggacagagactgccgggcccatttctaccctcggacacatgctttgggagggagaggatgggaacgtgagggaacgggccgcccagctgaatcttcagggtgtcagcggagtgtgaacaaagtggctcggaggtcagagccaggcacactctgatgggcccggccgtggctgtgttcccctctgggctctctggagaggcgagttcccagccatgccccgacctgctgcagcaggagcctgggggtggggccggtggaccgaggctgatgtggcttccaagtggctcctgcagctcaggtctggcagccgcccggtggaggggaggctctagctccactggacagagctttgcaggaggaagcactagggaggcattcacgtgggggtaaatccaggtgggaggacctggttgcaaggacaagtgtggggggaatgggacctgagggatggaaggtgctgagggagggagatggggagggcgtgtgagctgacgacaccgagggagggagagggggagggcgtgtgagccgacagcactgccggccatgcaagcaggggacctgggaccatgggaagcgaggacattccctcttcctaactgcatgcacgacaactgtgtaagcagcacaagtcaccttacaagattaaatgtgcaaccaccactccactctgccagatagagtaagggcaccggtaagtatcacacaggcagatgagcaaaggtaggcgtggaggccgccgcacagatgtgaagttggcccaggccagcgccccgctggctcatttagggcacaggaaacataggacctggggtgaccaacggctgcaggcaggtctggaagaaccagtcatgcatcttcccaacgtcaaagagggtgaaatgccatcagagggaaacaaggggcgcacagcacaaggccaagcacgcttcaccaacatgcatgaagctggttcccgcacttctgcaagaatgccttttcctaacgctgttgcctattttaaatatacagagagcagcactctgggagacacccctgactcggcgatgggggaaggagctgctcacttactcggccatgactcgccgcacgttgctggcatacagcgcggggttcctcttctcctcctcagaagggctgtacacaggaaggaactgagcacacagagaagctgcgttagtatcacaagacgctgacctcagcaacaccactgtaacgacaactgggaggctgacaaaattaagatctgtcaaagtaacgcccattagaaccgtcttcaaagttgtcatgtgcacgtgtgtgtacgcacacacacacccccatgatgcatgaactgcacacgtgtgcacctgaacactcaccctcattggtgctccctgggagcacctgctgcctacatcagaacatctggctctctgatctacactcacccccgtcagtgctcctgggagcgcctgctgcctacatcagaacatctggctctctgatctacactcacccccgtcagtgctcctgggagcgcctgctgcctacatcagaacatctggctctctgatctacactcacccccgtcagtgctcctgggagcgcctgctgcctacatcagaacatctggctctctgatctacactcacccccgtcagtgctcctaggagctcctgctgcctacatcagaacatccagctccctgatctcacagaggggcttacgcccatttctgacagcatcagttttgtaatggggataatgcagcacgttattcctacatttggaacagattattggcagcgttttgccacctcttgcattttgaaactaaaagaaattgtccagtgaatttgtccttgcctgagtgacacttacacagcattttaaatgaatatgacccacattgcacaccgtgcaggaaagggcacaagactaccctggatgtccttttctctaatacggaatatttcagaatacaggaacatcctgaaaccccaattctcgctgttatttctaaaacttccgtaaactgccatggttccttgcatcaacatttgcatcttgtatgaacaacgtcagtaaggacagagcagttttgcacagccattcactttcttttcaactcttaaaattagaaaccaggcctgtaacacagccattcaacaccagggagccctcaggagctcaagctcagtccctgtgttctgtgctcgaggcctggcctgcaccctcccggccactgcccatccagccacataatcctgctgggtgggggaactgccgccctcaggcccgggccaaggcccttcagcccagtcctctgtaatgagagcagcttatcctctatggaagtgaacagccgggctgaaagccgggcttatcagtatatttcgtagtgctctccaatatttactggaaggcagcaaattgttttattaaatatttaagttgcatgtgactcatcttttatttccagatgcaagaagtgcatattaattccccttttaaacaaaaaaagaactactcctcatcgacttagaaaaaattgtgcaggctacacagaggtgactatttagcccaaggtcttgactctggagacctgggtcaggctgagaagggggatctttgactatgtattaaacagagcatggtgctatgacaaactcagcggtattaaatatgtaaagtaaaactaagagccaaacaaataattatttgcatgtgggccagcttcatatgtccttaagctacaatacccataataatgaatggtaggtttaaaaaatcctttccagctgggtgtggtagttcacgcctgtgatccccgcactttaggaggccaaggcgggaggactgcttgagcccaggagtttgagaccagcctaggcaacaaagtgagacccatctctacaaaaattagctaggcatggcgtgtgcctgtggtccaattacgtgggaggctgaggcagggagatcacttgggcccaggaggtcgaggctgcagtgagcccatcgctacactccagcctgggcaacagagcaagacaaaatgctgtctcagaaaaacaaaaaacaaaaacccaaatcttatccaagtggttcagactcataagagagacataaagtcattgaggtaaagcaaccagaggctcctcgaaggagccctgagaaacggaaagatgggaaagcaagacaggtgatatgccacattgtacaaggcttatctgggcatcctggtgtaagctcgtgtctgcatcaaccactgtgaagagcgctgtgtaactctgtatccatacgaacctcgatttccacttggttgtgaaactgacacagcgtgagccacaggatttccagccttaaaaacagattgcacaatgttgagcagatttacaactcgggttaacaagtaaattactcccaattctggggtgaaacctccagacgcgccctccagagggcgctactgggcagtcaacgctcccacggagggggtgccgtgcccacccagcccgagccccagtgtgacgtacagccgtgggtggaaatgctgcttttccgattcaacacctgcttatgtccttggttcgtctagcaagacaccatctcctgcttgttctccagctcaggagacctcgtacagcccacacctgtccctccacacctgtccctcctcgctgtccccaggcagcacaggccctgagtcatgccacccctccagcctggatccagagttcccaacctcagaaccaggatcaccatgcctttgccgcaggagttgacatgggagacatttggagctgctcccagggccacactcacgcctccgacagcccagtgccccaaccctctttctgccctgtcatgccagccccagccctaggcccccgggaccccagaacccctataccccccagagccccctcccagctctgctcccagctgggagcctccacacgccagcctgggaagcgctgacctcaacaccttcacctgaaagcaccagcggacccacatcctcccaaacgcctggaatggagctgctctctcttggactttcccgctccctctgccctcccgacgtcagctcagacgtcagcacccaggaggccctgaccagcctgtggccccgggcttctcctctggggctcgttcccgtttccgtggggttgttcattgttgcataactgaccttcggtgtctctgctggggggacagggacactgactcacagcaggggctggcctcccacccagcactactcagtctctgtgcctgtgcagacggggtccccccagacacccctaaatctccactttccttaccaggggccaccaggtggacgatcgtaattactgagctggcaaactcgagagccgaatgcaagactcacagttcccttcctgctggtactgaagacgtgcaacttaagaccccagaatccaggagtgtcaggcctgggccacatctgtacgtttagttttcacaatgggctgaacctaacggctgtcccacacctgctttcacaactgcaaaagtaactagcgtgcacagcagaccccaagcagcccctacgtgttcatggaacaacaggacaaagaggacgacacggcgttcaacttacgctccaggtccttgccacgtccatgtgatggtgtcctggggaggaagaggcagggtcagtcagcatggggcctgcacccagggcctgcaccaagcacctgcgtgtgccggcctctccctgcacctcccaccccacagaggcgctgcagccagggggaagggaggagggtgctagagctccagcttcccagagtccctgaggatccaggactcggaccagccccccagcctgaggtccccagagcctctaaggacccagagaaccaccaccttacaggtccccagagttcccccaagatccccagagtccctgaggactcagagccccctcttataggttcccagagcccctagaacctgggaaaagggtcctccctccctccatgctctccgctttcctcacagacctggggacaccaattccagtgtgcacccgggaccccggccctctcctgcccaccgctctctccaactgctctgagtgttcccccaaccacggtgcatgtgcagggcccccccaccccgggtgctctgaagtcccatcttcagcctcagtgccgccgggcagggaccacacagcaggggccgtgacggcagaggcccagacaccgtcaccctggggtggaccttctgctcccctgacggctaagctagtgcttcttggtgcatccagtaatagtgtgttgctttaaacacactgatgaaacaatcttaaaagtggaaaatctagatgactgcacagatcggagtctgttgtcctcgggttgacttttttgcccacaggagttgcactggggcatggtttccgcagcggaggcaggaaggggcccttggccaggagcctggctgacaaacgcacgcctcagtaagaaggaagaggtctttcagtcgtgtgactaccggccctgactccattttattacctgaccgtcagctctccgggcaaagtgaagcccggcaggcatcggacgggacaggccctgaggcggatggcccagaaccctggcacccagaggtcacctgtatttctgccccactatgtcctgacccacgggggttttctttcagtgctttcctttgccatcacaaaaaggaactgctatagacgggaagctcgctgtgatgggcaggccctcctcggtgctctcccaggtgggtgctccaccaggaacctgcagtgagcccagcaccagtgggctgtggggaccttgagtccacctgggccgtctttatgctccaggagcccatgaaggggcaaggacgtgcgggagtcattgctgtggaagggggaacacagctggcaccaaatgaatgccctgagctcggcggcaggcctgtgaggcaaggtcgcctaagtggggagggccgatggaaccggaagtattctgagcatccaagagcacctggaggaaggtgcagcagccaccttacaggtgtggaaactgaggcaggacatgggcaggggcggggccagggggtggggctgcggccaggggcagggatggagcagggcctgggtcagggtggggtggggcggggcagagccagggcaggctggggtggggtggggtgggctggggtggggtggggtggggcagagccagggcagggtggggtggggtagggtggggcagagccagggcagggtggggtggggtagggtggggcagagccagggcaggctggggtgggctggggtggggcagagccggggtgggctgggatggggggagtagggtggggcaggggggtggggtgtgatgggccagggcaggctggggtggggtggggtggggtgtggtgtggtgggctggggcagagccagggcaggctaagcctcctccagaggtggcaaggccccatggggaactgctctgaggcctcgtccagactttctcccaaaggtggggtctaccaccttcgccccaggagctctggaccccaaacaccttcttaattctcttaaaccaaacaaaacctgggcactaaatgataaaaccacagaaatgacaaagtcacctcctttctctccagctgcctccgccttccagaacttaaatgttcttaatttttaaacttcctggagcatgaactgggtactgaaagctgctgggggccctggccggtgatgtggggtggaggggttccctctccaaaatgtcaggtttggcacacagaggaaagggcagctttgtcaggagctatggaagcagggctctggaacactggggaccactgtggaatcatggggttgatcagggacacgtgcatagaacaggccgcactcaggaacgtgccgagcccagggcccgggcctgtcctgccctctccagcgctgaggccggatggactcagcatggccaagtgtgggctgtggcgcagataaagggtgtggagagacagagacacaggtgcacagaggcagctcgcagttcccgtttcccggagaattcccctggaagctgaccccaaaaaaacacaactcaccagtttatttggatatcgtaaaaccacaggctggacgggcgctccagggatgaatgcacctgccgagaaaggaacagcggtgttgcccatggcagcccacgcaggacagcgtctgctgcgtttctcatgctgcccttgggataaaagtgagcttttctgtctaggccttcctggtcagcaagggcactccatgcctggactatctcaacatctgtcctgaccgtaaacacccagcgccacagcacggatgggcaggaacatcggccaggggcgctccccggccaaggaacactttctgttttaacatcgcgcacgagctggaaggcgtctgtggagggacacttgctattataacattgcgcacgagctggaagacatccgtggagggacactttctgctgtaacatcgcgcaccagctggaaggcgtctgtggagggacacttgctattataacattgcgcacgagctggaagacatccgtggagggacactttctgctgtaacatcgcgcaccagctggaaggcgttggtgggaagtgggggtcctcatcaccggccaatgctcacccacctgacggggttagggtctgccctcaccaagcacatacacctgcctcggggccccacccgccgccctcacctgcccctggggctcagctccaaggacgggcggatttggtcacagctgcagcaggacttgcccgggatctgcctctctctctgagtggctgccacctgatgggctcccaaggaatcaggaggagccccagcgaggcccagctagagccacaggccgcagaggctcaggaacttccccgttcccactggaattgtggctgtacccagcagccgctccgccttctcactggccggagttgtgcccttgcgggctggagcaaggcaccatggactctgtggatgattgtttctattttaaattctatttaaatctctattgaaagagtttttttttaactggaaaactcaggcatcagaagtactcaagttttagaacaggacaggcggtctgagaagggctcccctgcctggcgacctgaggccaggcgagtgaatccccaggcagcgcgttcctcccaggctgccagcgagtgccactatgtggtcaggaatttgcggttggtcctggctgcgggattctgcacaattctgggagaatggagcccatgcttgcccctagggctgccaggagcatctgtccctagggccaattctcccttcacggtggcctgaggccagaggcccgtgtcagggctgaaacctcgagctgaccgcccaacccactcagctttcgtctcatgcaggacatccacctgcagccttggtgtccagctggcaccccaagtccctgggcccgtgtgccgcagcttcccctgtgtccagggctgggttgcccccttcctgctgtgggctcagcagcacctgggagcaagctcatgcagttcacccagcacttctgtgtgcccaggtggacgggtggctgtgtcaggggaggcggaggacggcagggctggcacagacccaggctcaagccccagctccaacgcccggcagccgagtcccagcccctgagacacgcagtgtggaggaaatagtcctcattgcctgggaccgagcccaggagctcgcgtggagtgccgagacctgctgtgggtgataatggctctgctgctacagctcagccgaccatcccgaccatgtgtcaaggggacatcactgaaactcagtaagaatcaaaggaaacctcaacaccctggggacctctcaggaaagtccccaagagcacagaaaccccccatgagcctgaaaggtcagtgacttcatggaaaccccggtgggaaagtctgcaggggtctctggcctccctagtctcccaggggcccctgagggtcagcagcacccagaccccgccagcactgtgcacccaaggcaggctgcacaagggccaggctgggagaaaccaagatgaggcagtcagagcccagggcttctgaatgcaggaacaaggcagaggggaggaggtacgggcttctaaactgcacagaaacctccatattcacacatagcttgtgctgggcatgggtctaacgtcactagttgcaacaatgaggctggaagatggctcaacagggacccctgaggcccccagaaggccatcaccccttattcaccctgaccatcccccacagcccaccccacaggaagaaacagtccaccatggcccagggagagccgtgtccacatctgctcacagcctgtgcagggaggccgctgcggcccagggacagccacatccatgtttgctcacagcccgtgcagggaggccggggagagccacatccatgtctgctcacagcccgtgcagggaggccagggacagccacatccatgtctgttcacagcccgtgcagggaggccactgtggcccagtgagagctgcgtccacttccaacagccacatttggtaggcccgcctctgcatcctcgggctgtcagtgccatcgctgggcccacgcagcatcctagggccttctcactgtcttcgttctgctctgagagcttggagctggcaggcaggtggggtgtgggcatgtggagggcgtgggcccaggaccttccaggaggggtctccaggtacccagtcagccgatcctgctctagtgccctctgacaaggagggtgagtgtgggcactggagaggaaggccccacatgggcctgtttcaggagcaactcaatccctgcagagccctgagggtcccagccctgctggaacccaccacatccagcagaccccacagggctctgctgagctctatcacccccacctcagaggcggcacccctggcctgggtcagaacagggggactcaggtggacagtgcagcacagacaagagacactcaggagaaagaaggcacctgggcccaggaggaccctgctggaggctccaggagcctgaggctggaggctgggcccaatgcgggaaggtctccggggatgaaggcggggagtcagcagtggtgcccaaacgggtgaccccagcaacgtgaccccaacatcaggcgatgtgatgaaaggtggagggagggtctgagtgggtgggccgccatggagctggggcagctggagcccaaggcagcaggcaggttgtgggtgcctctgttgtcaggctcaaggcgggagacgctcacggctctggagggctccaccacgaggcgtcaggatcacgcaccacacaccaatttcacctccaaacaggaggctccaaacctcactaagaagtacccagctaagacgcatgagggcctgagagattccgaacacgtgactcgaggcagccggaaacccgggcctgcaggtgacacgcagaactcatggctggacccactggaaatggagacggggaaaggatcaagccaccgtgtcatctccccagaccccgtggaacccacctggggcacagcgagcgcccttcctggactgcacacagtgagctcctactgggcaccgccatgagtcccctcagtttcgtgatatgcgttgagaggtgctcacacgccctcctcacgtctacacaagggccgccagctccaaagggcaaggcgatggccctccccaggggcctccctgcaggcacgaggctccactcccgaggaacacctgcccttgaagacagggcccagcagtgaccccagccccacaccttgtcaaggaacaagacctgacgtacttgccagctgtcttctgcctggggccttggaaacacggcccacttttggccttcaccaaggttgcccacaggccacgcccaggcacggacccagtgtggtgggggcacacggattcgtggtcaccgcgtgccgcctccaccctctgcatctctggttctgatcagaatgactcagaaccacgcgtggtgaagacaatggaacgggaagacccagtaccttccagtgagctgcaccttgaagcctctggaagcaaaacctgccatctgcctgctgcaccaaggagggtggagggtgaaagcacgcgcatctgagctggaggaggatggccacaggctcggaaaccccggcggcacacgtaggtgagtgactgcacactttctcgacccagctcccataaatgtccagacactcaggttgtgcggccccagaggcacggcagccggtgccagtgtgagcgaggaactggcttttccacgtgactctgatccaaccacagagaacaggtctgcatgccccagtatggacacagttgatgaaagccactactttctaaagtagcccaagggagacgacaggatccaggtggaccctctgacacgcccaagggtgtgcagaattccaaacagactcagcgcaaaaagaacagtggactctgctgcctgctcactgccacacttcccacgtcaggggtgcagacacaatactagacccaggtaaccgccgcgggagagacccaagttcacacgcatttgagtcccccctccccagggagaaagaacactgtctaactggggacctggggacctgggcatctgaggatggctcgcagggatttgcacctgggattcccaggcgggtgtggggcgtgagctgcaggccaagaagggtaccctgagccattcaaaggcagtgagaccccttctgcacccaggaccctccagcctggacctcaaaacagaggcaaacatctatctccacctcactggaaacgccctgaaaccgtaacttctccatcttcctgcaaacatgataatccttgactcacattctcaaatttattttgtgacttttcttaggaatacctctaagaaccccagcacacaggataaaaacagaaactgttcttatgtgcacagcacattattaaaaaacatctctttaatattttccttttctctaggagaaaaataaacatttaagaaaactacataccaggtttgaaggtaattaggcaggtcctgtttgtacaagttccttctggaaaaatcattatctggaagtgggagaaagaaaaggatcagcattaaactgtacataattataattcagaacttacagaagccaatcttcacaatatattttcttttctgctgacataatttggacactgggatcatattcagtacgtaaattattaaaatgcattatggaagcacacactgatttccgctctgctggttttattaaagtgtggcagcagtatcaacacataaacagcatctgtcttcttcaactacagctcctggaaagcagggtagtcgcggtgcccacctctcagacactgtgagaaccaggtgcaactaaatataacccacggttggcacaacataagcacctcctgggggcagcactcattctcatcaggaagaaggtggggaggagagcaaagacccacaaatggcagtgcctggctgatggagccgaaggagggctgggaccccagcaacgggctggatgagcaggagagccgagccccagtcaggcagcaccctccacaccggggtttcaattcctctgactcacactggcctgcagtagcaaaaactgccctcaaactcccagccccgcaggctgctttcagttctgggccccgtgaggaagacagacctcaggggggccggcgtgggctcaccctggcaagcccagggccaggcaggccaaatgggtgggggaggagactgcctgtgcttgtgggggcagagctggggcaccctggaagtcacagccctctaaggggctgcccccagccagaccctgcaaagcttcgtgagcaatcagatcccagacagttctgtaaaatttccagcttctaatgatggctcagctggaaagaagaaaaacagcgtccaagctaatgtcagccaggctgcccctacagctgggttcagggcttctgaatgcctgggaaccagcatacagaccaggaagtttactccaggacttttagaaccacccaacacacagcaggctgacacatcaactccaaaatcacactgcaccaggagggcgggtgagcaatgctctatctgagtcagaacttagttcagaaaagatgattcaggaagctgagatgcatttgagaattgtttttctttactttaactttaaatttcgggcaccgaaaccaaatgcacctgacagcaccctcctgagttcacgcactcactaggagaagagaatcagaatccagccccggaggaagggccccagtttctttctccccactcgcgaagttcgcatctttcggaataaaaccactgaaacacaatcagggctacgtgcattacctgtggccactttccgttggactgcgcccgtctcttgatttcttctactgttttcctgcgagaatcctggtctgaccgggacacgaacacaggccgtatatactggatcagagctggaagagaggaggggagacggatcacgtggaatgcacggctcccgccaggcagggctgaggaacgagggggctgctgcatggcgcccagtggggcgggagactccagatgccccaggggctgtgccatgggtgggctgtgagtccctgactgagggaacgggaacagcacccgggcttcccatgtctgtgacagcaggaagccctgtagcctcagtgccacaagtaacaaacagcaagtccatggcacccactgaggacacggagcacagaacggaggtcaatgaaagacaaccgccaggaagcagaaagtctttagacccagtcttcacagaggacagggttgaaggtgccaggtccctagattggaccccgccttccccctgtgggttgaactgcatcccctaaaagacaagctgaagtcctcactcctggtaccgggaatgggacctcatttcgaaacaggtggtagcagatgctcaaggtcccggatgagggtccctatgggaagaggagacaaagcagatgctcaagctaaaatcccagatgagggtccctatgggaagaggagacgaagagggggagagaaggccaatgatgaaggaggccataggaggatgtggccacagcccccaccacgagccgggagggccgagggagctttcagaagagcccaatgcggccagcactttgttctggcacttctgcttttagacggcgggagaatatgctcctgttgttctaagccaccagctttgtggtgctttgtagcacagccccagtttaaccatggcaccccacagcctcctggaagttgcggggttggggtacaagggacaccccgccatgaaggctggtgctcagccaaggcaacgtggccacggcacctgtctttatgcaagaggattgaacgtggaaacatacttcttagaagagaaaactctgaagactttaaaatgaaactatccctgagtggagcttcctttttgaggacggtgagcaggatccacactcggcgccccccaggccaactgaaggtgtctctgaccccaccacgggctcctaggctgctgcaggtcagccccacctccccaccccagttcagtttccagtttcttttcttagcgtttttattacttgtaaggagtagcatttcatgacttttattctttcttggaggttctctcctccaagaacgagaaaattgaagccaaaaaaagaaaattccttctatcctgtggttgtctgttgggtctctgtggtctttcctatgtcttgaatcattttgctttttcacgattccagtactatttcatccttgctcattggttattcccaactctgctaaaaaggacgatatcggaagggaagaatggcggagtcgtctcgcaggatggcgcacgcgtcaaagaaatggccctgattgcgtggtctttcggtgcccactgttttggccaaagcgtcccatggtcgtcccggggcacacggggtctggagatgccaccctgccaccttcgcaatcctgtcagctggtttgttttgtgaacagagtagagatttcagaagttgtctataacggcaaagaacagaacagtgacgtgggggcgtttcacactcagatgggtccgggggtaaatgtggggggtgcagggggaggactctgagtgaagtcttgggccgtgcgtcttcatgtgggttgcccggtgtgcctttcacgctgagaactgggcagtgaggacagcaaggagatgcagctcctccccgggagccctgaggagggaagggtgtcaccacgccgtgtgcacagccacactgggactggcgcattttgccagcaagaaggtgacagcgttctgccgtcttttgggcatttgaggctcaaactttccttgacaaggtttgtaaatggatggtgcggatatgaaggtcactgaaaggaaactaagaatgtgaaaaggaaaaaatctacctggttgatcactttcattggtattcatacatctaaaaatgaaaatattttgaacattttcaacattcatctcttcaacaaagttgtgagctgtcaaagggtccacgaaaggaaccagaagtcaccacaagctgggaccggggagatgtctctgagctggaaacctgggagacgtctctgagctgggaccaggggagatgtctctgagctggaaaccagggagatgtctctgagctgggaccatgggagatgtctctgagctggaaaccagggagatgtctctgagctgggaccaggggagattatctctgagctgggaccacgggagatgtctctgagctggaaacctgggagatgtctctgagctgggatgggggaagattatctctgagctgggacaaggggagatgtctctgagctggagcctggggagatgtctctgagctggggcctggggagatgtctctgagctggggcctggggagacgtctctgagctggggcctggggagacgtctctgagctgggacctggggagatggttttgagctggagcctggggagatggttctgagctcccgaatcagagggtgctccaggtgcgcagtagaggagtcatcagccacgccccaggacaatggccctttcaggccaggacagcagggagcaaaatgtggttcctgctaagtctgaattctaacgaaaatttctgataagcttgtcactatcctctccctcgcaggtccgtggattatctctgaaatgacaagaaacacgcagggctccacgagggccctgcacacagcagcatggctgtggccattcttcctgctgcgccgagatgaaggtcagtgctgggtcacctgggttgatctggaagaggtggaatcccgggcctctagaaagataggactacaacgtccagcatcaccgcaccaaacactccttcgtgttggtgatctccacagggaggcaccaagggcacagggagagcccggccaacgctcagattcactctgggtgggccagcccccctgtccaaggacccctgcagctgcgagggtgcctgggcacacagctccacaatccccctccctgagcagatgacgaacgaccatgggcctttgccacagtgggggggcaaatgtggtttcctgggtatgccagaaccacaggatgcaaagggtgctgagtggagctggggctgccccatgagcctgtggagcttgcagagcggggaaacctgcgtgtgagagccaaggccatcactcggatggtgcctgcagtccagtctcgcctccagtgccggcctgtccagcctcctccaggcttccccagccagccgagtgcagtgagccctccagtcccaccaaggaccatccccgatttccaagcctgacccaggcagactcaggccacccacaactgcccagctgcaggcacagtctggacaccttccggctgctgcaggcccaatcccccatgggccatgccagggttcctcaccccacttccagccttcctatcccagctgtggccaccaccctcagtggtcagcaccacagaatgtgtccccacccagtccatactgaatgtgtccccccagatattttctagaaaactgtcatatgaatgctaacgttaggtgctgcatggaaacagagccggcaggagtggccaggtgagggccccggccataggcgacgcccctcgtcccagcagctccttccctcagcaccgcccactgccaacccaggacccgctgtgccccagaacgtgctgtgctgtgctgatggcggctgtgaaggaagcacgaggacagaacgggcccagatgccctgaagagcaccgaggacagagctctggtgggtcagggctgcgcacaggtgggtgaggggccacgcagggctccctacagtcctcccagagcagtgggtccatgggatgcggcccccaaagatgggtccacatgctgaccctggaacctgtgaatgaggccttatttggaaaaaggtttttacagaggtaactcgttaaggatctcaagatgagagcatcctggatcacccaatgactggtccttataagagactcatagaggagacacttggagggagccaggccagtcgaccactgaggcagagtcagagggacgcagcccccagaggaggaagaggcaggaaggggccgcacagggccttcggcccagagacgccttgattttgaacatctggtccccagatgacgagagggtgaatctctgctggagtgagcccccggctttggggaggggtcatggcagcaccaggtgctcaggtccctggttcacggcacagccgcggtgcatgggcagccctgccgacctgctcccaaagacttccagaactgccatctgataaaggtgagccacccttgccaagcagacctggagcaagcactgtagcctgttatgatagtgagggcactcaggtagcaataaaaataacaattacaacaacgaaaattacacaggaaaccccaacacagaaaatggggcacaaggccaatgtgcccggcggtgggggctcgatcactcccagcagcgtggtggggggggggtccctcactcccggtagggagggtctcactcatttccagcaagtgggggtccctcattcctagcagggagggatctctcattcccagaagggggggtccctaaaaaccagcagggagtccctcattgccagcaacagagggggtctcactcattcccaacagaggggggaccctcactcccagcaggaggggaatctcttattctcagcagcagggggatctctcactcccagcagggcagggtccctcactcccagcaggggtgtctcactcacttccccagatcgggatgtctctgctctctgccttcatcacgatggaggacatcgtcatggtcacagggatggcgtcgaagtaggacgagtgaggcgcgagcgtgaggatggccgcctcggtgggcagcgcctgccgccccttcacggccacccggtggaagccgccggcgaaccacatggtgcgcatgatggccttcagcaggaagtccacaaccctgcaaaagagggcgctgcgtcacgcgggcacacgtccgcagtctcggagtctgtgtgaggcacaggggcggtcccacgggagagccctccagggcgcagtccaggccacgggcttcctgtggtcgccgccgctgggacatctgcttgagggaagaaaagacgccgcgccttcctggcctccgcctgtgtcctcgctggctgcgctctcacctacgaaggaggccgcggggccctgtgtggtggtcacgggccacgcggcaggcagtgctaagacaacatgagactccggaacacagacagcacaagtcccaggccagaagacctccggaccttcatgttagcaacttatttatcagcatcctatcattttgaaatgggaaaaacattaaaacacctaaaacgcatatcgcaatatgggggggggggcgctcagagctgagggcggaagctgagacctgcgtgcgaacttccccatctcatctccacaggaagcccggggttcccacaaccaggcgttgtgttattacagtgagctgtttctggaggaaattagatggccaataaatttggaaaataaagtaaaaatcagcctaggttaactgaatttgtgtactctttatctctttttaaaataggtacaaatttagccttttaaatgtgtgtattctctttcatatgaggctacagattaggctgttattccacacctcagggaattgacacgcagcagacagccacggtgtgtgagaagccacaggtcaggcacacagagaacatgattcagcctcatgagaagccacggctcactcggccactgggttaagtgggcgcatcacactgggtaaaactactgcacagagaaacaagagcctgaagccttactggattcacattgccctgggacagatgatcctcccagaagacttccaggacaggggtccccatggatctgagccaaggcggttgctaggagggcacaaagcctcctctcgtggggccaccttggaatggcctttgtgtatgcgatgataaacaatggtgtagttacacatggagatgctggggaccaacccagggtgctgcttgtctagaggaggggggattacacaggtgtgcacttcttcaccacctgttcagctgcatatttaaaaatgtacttttctggccaggcatggtggctcacgcctgtaatcacagcactttgggaggccaaggcaggtggatcacttgaggtcaggagctcaagaccagcctggccaacatggtgaaaccctgtctctactaaaaatacaaaaattagctgggcatggtggcaggcgtctgtaatcccagccactcaggaggctgaggcaggagaactgcttgaacccaaggggcggaggttgcagtgagccgagattgcgccactgcactccagcctgggcaacagagtgagactccatctcaagaaaactaaactaaaaaataaagatgtactcttctgtgcacatgttattttccacaaaaaaaaaaaaaaagtacaaaaacaaaagccaaaagacagcaattgatgcctaagatggaagaaacaaggcagcggcggagggagaagcgaggctgcagaggaggctgcggcgggcacaggagccagtctcgggcaggttcaggggcaggagagaggacagcaggaaaaaagggattaaaacccgggcggcccttagaggaacacacctgccagccccgaaatcgaattgcagggacagacggtgctcaggggaactgtactgggtgtcggggcagggaaaaagcagcctcagctcttctctaaagatcttggaggaattttatacccaaactatccacatgtgaaaacccggactgctggtgtggatgacagcctcagagaaaagctccgcttgctgtggggttggggacccagcacccactcaccccaaggcaaagggagccagcacaagcccagggtgctcaggtgcctgggcagcccattcccaggggaatgtgaatcaggagacagatctatctgcatacacaggagcggggatctccatcagcacccccaggaaatccactccgtcctaccgccctcacacggacgacacccaagaatcctgagacgtgtgagcagagcagctgcatggcagagaagcagaggactgaccccaaggagacagaaagggtgggcatcagaagaggggtgcaaaacatccaccacgctcgccaagagagtctggaagaacagggcgctgaggagcatcaaagaacaagaaaacactctcagaaaccaagactgtcactgtggagacaagcaactcacaggaaagactgggaaatgaggaggaggaaatctcccagaacatgcagggggaaaaggaggaaggccgctgaggcctgcatctcctcaagccagctggcatgtggaggtgggtgggggaagcccacacgtctaagcgtgaggggcaggcgcaggccccggctctgcaggttccaaatgttctgctgtgagcagaggcaagaggcagagtggagccggccctggagaggacctatacacatgtacacagcctgagtgctggctacggtgccaggccggtggggtagggcaaaggaaggggccctggggccacgtctggcggggcttcaaggaggcaagtctggtgatccacgtggactggcttagctgggtcagggacggcccctgggtggctggtgggagggctgtgttgggctggcaggtgtggaggggcagccccaggctgagacgcaggtggcaggagctgctggcttctgggagaccagataaagtggtttgatgctcaagttcaagctccaacctccaggccaacatacggggagtacctagagtcatcatggggatggcatccccaaacttgggaacaggtgttcccacacagagcattcaggaaagggcaccatccatctgaaccatccggtcagccaaggggcagcccctggaggacctggcccagctcaggacttggcccgtggtcaaggattcagcgccagatggtcgggttttgcaaaacgatgctacggtttttacaacactgtgtgtgttgaaagtaacctaaaatagtgccttttgcgaaactgtgtcattctttcactgaaagcctaagatttttattttaggaaggtttgaatgacactaacttacattcagcaaaaatgctttaactcaacatcaatctattcaaaactgcagagcagtgcataacgtgagccaacttaagtcccaaaccgactacgtaattattattcagcggtacactctgaatctgctacttcaaattcagtttcctcctgatcccttacgtccctaactacggtgcttttgtgactaggtttccccttggggagttcagaattcagggtttgttctctcttctgtttcccttcaagcaccaagccaagcccaggactgtgcaccaagggagctttcatcagtgctgctgaaggagacgccaggggctccaggggtgggattcaatgccaggcagcacgggcagcttgagtgcccacaagcatccgtgcatactcccacacatgcacacattcacacacatacacagacatcgctctcatatatactcacatgcacacacacactcatacatatgtacacacatatactctcatacacatatgtacatacatcatacatatgtggacacctgtacacacgtacacttgcacatatacacacatacatgtacacagagacacaacactcatacacatgtacatactgtcatacacgtacatgtatgtgcacacgatacagacatccatccacacatatatacatgcactcacatgtacacacatgcaacacacacaggtacacagcacacacatatacacatgtacacactcatatacatacttgcactggtggctcacatacacacagtaatgcaaccacatgcctatgcacgtgtacctactcccgtgcatgcacatacatatgtatgcacactcacatgcgcatatgtacacacatacacaccctctctgcacacatacacagaatgatacacagtgagtctccacagacccagatgcccaaagatctcatgaagcagaggtgacagaaaccccaacgtgtcactgtcacgggacacttcacacgtgcatgagatgtacatatgaaagcgtctctgaagtacagctgctagaataagagtccgttgtggtccatttatcgcctgttgaagccaagtcaattattcacagacaagaaaagccaccagggttagcatggggaaacggaaaattgccccaagccatctattttgaaaagtgagagcctgtgctcgcacggggctcctgcctcctgagacagaacagaggaggcggggagctcggcccaacaaggacatggggagtaaagagaaagggtgccaggaaagcaccacgaagccattgctgcccacagcaccacattcagccaggtcacctgcagcctgcttcacactacagaacccccactttctagctgtggcttctcaactcagcaaaactgaaagcctgactttgatttggccttgatttactttgcttggttatatatttgatacccaattcctattttatggttaaaacgtttcaaaaacaaaccaagataaagcataagagaattttaaaaatctagaaaggctaaatgaagaactaaagcccgtgatgatcctgttgcccctaaagaacccaggctgccccaggtcaccactacccagcaagctgctcaacgtccacccactcagcagggcccagagtgagggacccccaacgcccaggctgccctctcctatgactgcaccatgtctgcacgcaacggtgcggcaaacccgggaccctaagtggccgtcttccccctgcacctaactgcatgtctgagtgtggccctgggtatcaaggagaaccgaagctcaggcagatgtcagctcccatcagcctcttggccgtgaaaactttgctgtacatacagcccacagatcagacaccttccagagaaaggaggggcctgggcgtgcccattacacctttcggaggccaggcagtgaatgctttaggctctacagccacacggcctctgtcccaaccacttggcccggttccccaccaatgcagccctgaacatcacgcaggccagcgggcgtgcccgtgctccagtaaaactttacttatagtcaggcagcagcctccaattaactactaatattcctgtttctgaataaaagattcagggagcccctccagaatgatgagagatgttaacaacacatggaagggttgtcagagctgtggttataggacacgcgtggtaacttttaagatactgaaaatatttatcaaagtatttatgatatctcaacattttcatttgctaatggcagatactttcagtgaaagcacagctttaggaatttaaatgaaacaagaaaatattgtgatttagtttaattttttgtggtctgttttggatctttagtttagatgtattcctcatcgggtaggtgtgctttatttatattccgtgcttaaaagccaggaagagtttaggtccacaaagcaagggaaagacggccctggaggggtggtgccagcaggcagcaggccaggccaacgttggctgacatgcagtctcggagggcggggaaggacccgagcctcctgtccgaaggcagggctgggcctggctccagccagttgctggccctggggagcaggcccactggccggagcttctgcttttccaagactggccagaaatggggattttgatgtcaagtcactgggcctttatgatgcggcaacctgttcccacttagcccaattttaataagaccaggttggcaggagatgccatggtggccacctgccccccgagcagccgttcccctcattgctgctgctctcacacctggaagatggcccctcccgggcccacggcacccgcaccaggtccagctgcctctgcatgggggccactgaggcagggacctccctaggcaggaggcctgtgtcactgtggtgccctgtcactgcagcccaagaggccgtccactcacagcctgagggtctgggggaggccaccatgggcagggccagagctgagggtctgaggtgggaggggtaagggggctggcagtcacaaagccaggagagggtgtccagaagcctgactttcgtcagcaacagggagccccagcaggttctggagcagagaaggctacggtgtaggggggtctctgtgctcaagggtgtgaaacaatggccacacatcctgcagacccctggaaaatgaagcctcagagcaggactgtggcggaggcgtggaagacagaggcaacggggaggtggccgagtccccactggcagggggcagccctggtggacgctgggctcagaagggaaggacagatgggctagggtggagacacacaaccccactgtgagaatgggttcccactgtttggccgcgtgacccccccccaggaggagagcacggcacacgcgcaacttacttcctccacagggccgggggctgctcgggttccttctccgcagagcccagggatgcgacaagtgcgaggggccaggccagcagcatcatggcagcggcaaccaggagccggaccgggaagagcgtcagtgtcatgagggccacctgcagacagaggggggcattatccagagaatccatgtaggacaccaggcagctccccacccggcagaggctagcccagggggacagcgcgccccacagagtggagagctggggaggggctgcagctggcacacagctgaccaaggctgaccagcactgaccgaggctgaccaaggctgaccgaggctgaccagtgctgaccggcgctgaccaaggctaaccaacactgaccagcactgaccaaggctgaccggcactgaccaaggctgaccaacattgaccggcactgaccaaggctgaccggtgctgaccaaggctgaccaacactgaccgacactgaccaaggctgaccggcactgaccaaggctgaccaacactgactggcactgaccaaggctgaccaacattgaccggcactgaccaaggctgaccggtgctgatgccgaccagccctcaccatggctgtggacactggccagtgctaactgacatgctccacacccactgcccgcttcctgcctccttactggagctgccatgcgagtggcttgggaaagacacagtggagcttcctcctgcaaattcaagggccactctgacgcacagcacacaaccccaggcagctccaccccgcaggacgcacccccaggcagctccgccccccaggacacacccccagccccgcaggcctcactcagcagtttcccctgaaatcgtttatgtggacatgagaaagcatacgccaccctaggcagtgttggtgacagggggaggtagctggcctgcagtttgcaaggttggacctcagaccacagagaagacggcagaatgaaggtgtgactttccagtcaatggaagacccggcgcaggagagtgaactggcgggagggcaggggcgcaggtcaatatgggggctcaggaaggccccccaagccagggcaggcccccacgccagggaaggccgaggctgcgggatcccaggcagcccagggtctgaggatggaggtccctccgggaggcgggcaggactccgtgtagaggggcgggaggctttgggtgaggggaaacaccagtcctgaggtgcaggtttagtgcagagacagaaaagacccaggagacacagatcgcagttggctccccaagcagcagccatccctaatttctgatgcctgtcatgagagcgctcccactctgtttccttggtttgtccctagattcttttgagttctcaacggagaccagcatagcccaagagaaacatgcctgccacatgtgtcattttaaattttcgagtggccacatttaaagggaatgacaatttaatatacagctcatttcgcccggtatatctgaaataccatttcgacacgtactcaacgtagaagttgctactggctagtttgcattttctcccgctgtcttggattgtgcagtgtgcatttcactctcacagctttatgccacctgtgtctccaccctgtcagtgcccagtggtcaggtcagcctgttgggtacgcagatctagatgatgtttggtttgcgagagatgacgacctctaatttgcctccccttccccgcttctgggggctgctcctcaccccagctgggtccccgcttcagcatcacactcgctgcaccaagcaaccacaaatctgttatcccgccattggtgacgatcgtcactgttccacatcgtgttactggcattcagcaaacgttctttactgctgagaaaccttcccaggcctcatcctccacgagttttgttttgctttaaatcatgaacgggtgctgagctttatcagaggtgcttcctgcatctgtggggagagccacgtgctgcaccccacttgaagccactaacatgatgccttacggccacggtctctctaatactgaaagctagcttcagcgctgtgcagctccctgttaggattgttttttaaaaggaattgctaggtctgttggccactgtcaccagctgttaagtaagacgcgcctgtccgctcctgtcacttcctcccagcggcttcctcgtgcagtcgccctacgaaaccagcgtgcacccatgcctgccggcagctcctgaccgttgcttcactgtttccaaccctactgtttatagagtccctttttttttgggttgacttcactgtttttgtcaatggggaagtctcttcctggaagcttttggcatatttttccctcccgctaccaaggtctcctcccagctgcctttaagataacagtgaagttgcccgccacactctccttgggttcacaccaagcctgctctctggtttcatttctaatgttatctgtgtctgccaaaacttctaaacctacgttgccagatatttttctattttatcagtcttcttacagaaccatctcagatttgttcattctctctgttgtgacctaatcatattaattttggctcttattagttcctctttcttctgctttgaatttagtcaaatattcttttcaactttttgagggaaaagcccactttgttattttcagaaataccttatttcctgatagtcacatttagaacacagctccccctaaggaccaccttgatttaatcccacaagtctaaggggcagccttttcctttatttgtaaaatttagttttaaatatttcatccattcccatctactgttactgtttcatattttgttgcagtggaggagagcgcagcggaggagaccgtagcctcggccttcagcccacctggtcccggggctccagggccactggctgggaagaggccactctgcagtgcacaagcctggctctgctgttaaagccgacagctaggcagggcgtggtggctcacatctgtaatcccagcactttgggaggccaaggtgggaggatcgcctgcggtcgggagttcgagaccagcctgaccaacatggagaacccatctctactaaaaatacaaaagtagccgggcgtggtggcgcatgcctgtaatcacagctactctggaggctgaggcaggagaatcacttggacccgggagtcagaggttgtggggagctgagatcgcgccattgcgctctagcctgggcaacaagagcgaatctccgtcccaaaaaaaaaaaaaaaaaagccgacaataagttactgggtaagtttcttcttcccataaattgttcttagaacttgttgcctccctgggcagacgccatgaagtgtgataaccagcactaagagaaagtctcaggaagttccccggtctgaccctggggccacggcagcctctgcccacagcctgcttcagtccacctctggtgctgcagccaactctgctacaacactgcttccaccagagtgtggaataaaatcacagtaacccacgctgttcctgaaacagcaccgactgcaacactgcttccaccacagggtgtggaataaaatcacagtaacccacgctgttcctgaaacagcaccgactgcaacactgcttccaccacagggtgtggaataaaatcacagtaacccacgctgttcctgaaacagcaccgactgcaacactgcttccaccagagtgcggaataaaatcacagtaacccacggtgttcctgaaacagcaccgactacaactgcttccaccagagtgcggaataaaatcacagtaacccacgctgttcctgaaacagcaccgactgcaacactgcttccaccacagagtgcggaataaaatcacagtaacccacggtgttcctgaaacagcaccgactgcaacactgcttccaccacagagtgcggaataaaatcacagtaacccatggtgttcctgaaacagcaccgactgccaggccattccatatgggaccacccactgggaacagctccggggctgggggagcagcgccccatccccaaacaacacggggcatgaatgagccctgggtggggaggccccgcctgcatgccgggtagggtagtcaggctgctggttccttagcacatggggttcgctgggccagccagtggggggatgcactgtgagaccacgtgaccctcggctcgcgcacccccacgcctgctcctgcgcacatagggaagactgggcgaccacctgagcctcgacttacacattcctgcacctactccttcgtgcatgggttagactgcatgaccacctgaccctcacctcacacgtccatgcatccatgcacctgctgcttcgtgcacggggaggactgtgtgaacaagcgaccctctgcaccagctccttcctctatgggaaagaatgcctgaccacgtgacgctccccaccagtcagtgcacctgctcctgttggtgtcccagaagactgcgtgaccatgtgaccctcagcccatgcacccttgtgcctgctcgtggtgcatcagggaatgcggcccacacttctgagcttagcagcagcaaggagaggggcctgtgggccacagttgcaatcgctgatcctcggcaaacagggctgatgaggggagggtggagagggaacatggccagggaggagctccccaggcctccagcagatggggagggtgtggctctgctctgcagtgctgtgaaaactgcttggagagggggcctctgggagccccaggcaggaggaggagcagtgctcctggtgaagagcccgggcatctccaccgatctgccttcacctcacccagctctgggcctgtgcgctctttctctgccaggctcggcccgcccacaggagccgggagccctcaccaaggagaacaggacttgggtgactgctgtgactccttccagaagcttctatgaccccgcaccttctgcccacctgtctccacaggccccacccctgcgtccagcctcaggcacacccattgggatccctccattcctcatgcccccacgccctggtgcagatgggtctggatggactctagccccccaggagatgccagtatggcagagctgcagagagagaagctggctggggcagctgcggcagccaagcccctcagcactggcaggggtggccaagggaggtgctgggtaggcaaagaaattcttagaaaatcctggctagaccagaaactcccagaacaatggccttctaaggaaagggggctggcagtgcggtctcccaggcagcgtcgctggagactcaggtcgctaaagtggaggcaccgggcacagccattcctccccacggcagctttgcagtgtccactgagagcaagcgtgcgtttacagacctgcagccacagggacacctgtcagagagggcaggtgtcttttctcctcacccaagcaaggcccagcaccctggctcagaggcttccacagaagcccccttggcaccttcaccagaggcagcaggggcagcatgcggaaccaagacatcactgcaagtcgtggacagggataagcgggctgttgcgtggacaaggtgggcagatgtggggagcgggagcagcctccaggcagtgtggccagaggctgaatgcggagagggggagggactcagagaggagaacacggaccacgctcctggtcaccataggtcaggcctccacgcggcagccaactggggaggacactgtggacgcctgcagacgctgagacctgcaacctggccctcccaagacaagctgctgatggctgtgggccggctgtcaccacaggaccctgatcaccctgagaaatgccagttggaggaagcaatatggtcaccctgtgtgagccataagtgagggtttatagcataatcctaatgaggaactttgtctgaagtctgaggctgagttacttcaactatttgaaagttggctacgataaaccaaggcgtccaggcagtgacctgcccacatgcagggagagctttggtgcggactgcggccgctaaataccacttcccagcagaaggcccagggctcctcagccgggcttgctccaggtcacaggtgggaaatgcagagatgaagatgggacagcacggcgcagcccacatcagggaagctggcaggggccgggcgcgagcgctcacgcctgcagtcccaggagcacggcgcggcccaaatcaaggaagctggcagaggctcatgtcctgagggctggctcgaggcctacccagctcacactcacgtgacagggatccagcaacagccaatgccgagcctggtgcaggagcagcacagcagaccagtgggaactgaccctctctgggtctagatgcaaccaccagcttccagaaagccccaatgacaacaaggagatgcaatcaatcagaaaatgcagagaactccacaaaacacaaaactccacaaaacacagcccaaatccattgcagcaaacaaggaggagctggaggaccctcctgatccacacgcaccagaggcccgagggagctcgttcacccctccaccttgcgaggacacagaaggtgccatctattgacccggagggggtccttggcagacaccaaatctgccggcatcttggacttcagcctccagaatggtgagaagtccgtgtctgctgttcgggaggcacctcgtctgtggtcctttgtgacagcagccgcgccaagcagggcgggcacagtgggagtgcacgtgaccccggcctggccacacaccgtcattctccgggctgggggacaggtcccaggcccactgtattatcactgctttggtgttctaggttgaattttgcgcccccttccccaattcctgttgatgtcctgacccccaggactccagagggtgactgtatttggagaaggggctgttagagaggtgacgaaggtaaaatgagatcatctgggggccctgagccaacctgcctggtgtccttataagaagaggagatgaggacacagacacccagggagggacggccctgtgaggacacagggtgaaggcaccatctgcaagcccaggagaggcctcaggaggaaccagccctgctgcgcctcggtctcggactccagcctccaggatggtgagacaacaatgtctgtggtttaagccccatctgaggcactttattatggaagccggagctgagaaagacacttgacatatgtttgaaatttcccatgataaaaagtataaaagtgatgactcttggcttaaatgtaaacaaggccatccaaatgttggcctggaactctctggaagtctctgagtgaaggcgccggtggtcacaatgcccaggcccaggctctctgatttcaggcagctggcaaacccctccctcgtctctgccaaggccaccagggccgtaagcagccccaggccccagcatcacccggcgtttcacaatcagtgctgaactcaaagacacgaggttgccagagaacatgtggtccctctcgtgtgcactcacgccatcgcggtgcccgacaggggtgctgcggtgaggcccaccaggcgcagggatgctgcggcccctccgagcccacttgttggagatgtcacactgcagtgccccagccagtgaaggggctccaatgcacctgcaacgaggcaggggtggaggggaggctgcccaaaggatggcgcccggagactcgaaggccgcgaggccgcgtcatcccgcacaggcggccggggcagatgctcagtgccagccaccccaagctctacggttagcgcggtggaggcagctcacaggaatgctccctcctgaaggtgcatcccaacattgctgctttaattatgtggaaaaaattatcccaactccacaggatatgcgacagtgcgcttgcaaatccacgagagaacgtgcactcctcccacggtgagagggcgagcggcagcacacacaggcgcctgctgtccaaggtctaattttcttttgctttttccttttagagaaagaacaacttttgaaagcacagcagttctctcaggcatcccatcggacggagccggcacttccatcagcaaacaccaccagcccgccctcggcatctgagagctggagggagcttcgggaatcacccactcccgtccagcacccacagacacaaaccgagcaaggcagcagcaggaaacgccctccttttctgtctccccaatcaccaaaacacctttattcatataacatgacttctggtccaaaccaaacgctgccttcaaatatggaatcagcgatcacgcccacaatgaattctcatagttaacgatactaaaagcagacaggaaatgtgaaaaagtggcaccgtgaaccattgccgtgggctctctctgcacacacaaccactcttacctttggagcccgaggcacggcccgcaccccaggcgctacagatcccaggtgaggcctgcaggaggagggatgggctgccaggagcgcaggccacatcacggggacggtttcattgggaggaacattttatgtttactgggtattcccatttctgtttgtgtaattttctcatttatataaatgtatatacatcttgtgccaaatttatggtgggtttctttgtctttttctcacccctgtgaacatccattgtctccctgaccttagatttcagtgaggtcacactctggagcttttcacccccaccccgtgtgactgcaggaggatctgcgcctccccgcaggaacccctctcccccacagcccgtgcttactgctatctataaagctgtttcttcttcgctctcccactcaaatctaaaattaaatatagcttttctaaaactgaactatttctttgcaaaccctcaaccagccgtaccgcctcccgccgctgtcatctctactccaccgtcctcaccagaaccctcggcaccatcacctacccgaggctcttgcctgcgagatgacagtgtgttcagtaattccctttggatttgcaaatcggccccgcagtcccacagcacagtgattctcctagaccactccatttaccattttcaacccactccagtccacgggcgtcttacgaggatgctgcacggtgttgaatgggatcaaagccagtctggtcttggccatgtctaaaccacgacaccctgtgactggggaacccccatcaacacccaaccagctcccctgtgagccagcttccaggatacagggacggccctgggaccgttggcaccagtgtcgtcactgggactggatggtagcatgcaggtagcaccctggggtgacaccaatgccgcctgggccgtggtgctgcatctgtgggacactggaacatgacctggagggcaggcaggcctggaggagcatgtggtgtctctggagcaagggccgctgctggagggcaggcgggcctggaggagtgcagtgtctctggagcaggggccgctctccgcagcgtgggtggaggctgtctcccatggcttctgcaggccctggttagtcctgctttctggaaacagccatgggggagcacaccttcctcctgcggggcgtccccaccagcgtctgaggggcactggctctgagaaaaccctgggcccctaagacggcactgaagccccatatcccagcaagaagagaccagggagtcactgcggttacttgctcatgcccacgcaggcctttctgtggatctccacacacagcacctccgactgcgaccgcacagctcctctcttgcacctgggctcacggttggctctgcggggttgacctccccggcgcgcgctgtttgtgtgtcccagttacctaggttctgtagcagacgtggcatcagagaccacgtggccccaacccctcaggggacaccacctgcacgcctcgctcaccctacgtggggacatcacctgctcacctcgctcaccctacatggggatgcacctgctcacctcgctcaccctacgtggggacgtcacctgctcacctcgctcaccctacttggggatgcacctgctcacctcgctcaccctacgtggggacgtcacctgctcacctcgctcaccctacttggggatgcacctgctcacctcgctcaccctacgtggggatgtcatctgctcaccttgctcaccttacgtggggatgcacctgtacgcctcactcactctgccatcaggacactgcttgaattcctctcttgaacacagagctgcttcctgcagacagggtcagagaacagccagggaatccctgagtgggatcaggccactccagtcttggttggccaggaaccgagcccctccaggagggaggtccatcgagcagcctcatgcatctgcacagcaaagctgtgcatcgtcctctgctcccagatggtggcaccctcctgcttgccactcagccaacaaccccaaggaggcagcctcatggctggggatggctgtgttgagctgcagccccagctgtccctaagctctgtggcttgggaggagcatcacttcccggtctcagcgggtgtctggagggtgggctgggtcctgctgaggccaggcaaggaggctccacctgggcagccccacatcaccaccaggacacagcaggtggcagagggcgtaccacacttagagccctgctcattcgccagtaaagtgagccccacggccacccggacagggcttggcaggcacagtagtctgagctcctgtgtggcgtgcggccccgtgagtcgcagtggggctatgtgctgggtggtgccacacaggcaggccctccatgccccatgtccaatcaggaagatatggagccgctgggccggccacacccgccttcggagtcactgtcagctctgcatcatcatcccacggaggctcacagggtcacaaggccccggcccaagagcagtcccacactagagcctccctctcactatccctgaagcacccagtgtccatgcttcccgtagaatcaagggccatagacccccaacatctggggcaagcaccctgcagtcactggagaagacacagcttgctgaagtgcccacggggggccacatctcagactttcaaccttgtgtactacaaatgcagattcctggacaccttgtgacctttggaatgaggctgtgccctgtgggctgactccctcgggccccctgagctatgtatggcccacgccttcacctggagtcttcctcccatcggggggctctgctgtctggactaagcgttccctgacaccctggctcacacccgtgatgccagcacagggcatggtgctcacacattggtgctgttggaaagtaaccagtaaaaaggtgtgtgaaagaaaacacgcttactcattctgcagacaattcctgagcacctgcaatgtgcactctggacaaatggtgtccaggtgcaggcagaacgagaccgacggaaaccgcagcaccacctggctcagacggcacaggtgcagcccgtgtaaagatggcacgcgccggcatcctggtgtgggcctgcgggaaaagggcgtggggtggaggtgcaagctcagctgagaaatcaggagtagagagtgcagagccccacggagggagggcccaggcagggtggctatgtgagcatcacagccgatgccccagttcctgcttcaagatgaccgatggcaggcaggtgccggagccgctcctccggtccccaggctggcctccgggtcctgcccacatgctctcccagacagtcctcatgcctcctcacccgcaaagctctgcacaaatcccccttccctgaagggtttgggacacccagccagagttctgtccctctggtccctacatatgacgtcccccatgtccaacctgcagccccacactctagaggagagattccacaatacaggctgcaggctgggaggcccttccattgctgcctggtgaccccgagggctcagctcctgcaaggcctggctcacggcaggtgctcgcaagaagaatacaggagggaagggagcagaaactcagaagtgtaagcttctgggctgcacacgttccactgtgggcacaggctaagcttcaaaagcagaaactagctgcagattcctatttggaggctgcggggactcggttacacctgacccatttccacaggctctcacccgtggggcaggacaccctgcgattatgtttcctccatttccacaggctctcacccgtggggcgggacaccctgcgattacatttcctccatttccacaggctctcacccgtggggcgggacaccctgcgattacattctcacccgtggggcgggacaccctgtgattacatttcctccatttccacaggctctcaccggtgaggcgggacaccctgcgattacattctcacccgtggggcaggacaccctgtgattacatttcctccatttccacaggctctcacccgtggggcggaacaccctgtgatgacatttcctccatttccacaggctctcacccgtggggcgggacaccctgcgattacatttcctcagaaggcagctttcaaggcaaagctcccacgtgcagaaacgggccctggaggtgggagtcccaggagccgtggagaagctccaatgagaacggggccagatgggcagcccgagagcagaacccccaccaccagcggctggggagaggctggagatgccagggccctcctgggaggcaccagctttgtcctcgaggccgaggggaggagaagcacaggagatgctgggcacaaggggcccggcacaggccaggcacagggaggccccagcctcatctgcccagtgagcgatatccaaaaacaacaaacagggtccacatgccagcactgcagccacagcagcacgaggggccatcgcaggtgcacgggcctcacagcttcacagagcagagccatgccaaacgctcgcggtgaaaggcagcctgtttcttcagtactgttccttcgacaggtcagtcctgagccccaggctgtgtcccaggacactgggagtctgctccgcactgggggactcaaagtccacacggggcccacaggtggtcaagtgaaccaaacgccccacaccctgacccccaggtgtacattctgcacattttaattccgaggttgggaatgcaccctacgccgccaggcacgccgccaggccgaggtctgcagcagcatttcactctgttggtgtccgaggacctcaggggctgtggaccatgcaggcgctgcagacagtgatacatcgtggggggctcaggagaagcaggctcctgggatcattccaacaaaaaggtccccctgcgtgctccgccaggaccccaccttccacctccagccaaaacaggaccttcacacataccagcacgcttcccattcagcccaggccctgagacaggccctccggagctgtggcccagggaaacgccaatctccccggacctcccgcctggtctgagtaaaaagaatcctgaaattcaggatccgtggcatttctagctgcttgcatttgtttaacaaacatctgcagaaagccagtggggccctggtggagagcacctcccaagccccctgtggtgggagccccacccccagcacatcctgcatcaggggatcctgctacaagaaagagtccccagcctgctggcccttcctactccgaactggccgcagatacagggagccccccagcacatcctgcatcaggggatcctgctacaagaaagagtccccagcctgccggcccttcctactccgaactggccgcagatacagggagccccccagcacatcctgcatcaggggatcctgctacaagagtccccagcctgcccggcccttcctactccgaactggctgcagatacagggagccccccagcacatcctggcccaaaccctcaaaagctgcaggagcccacagcctgccctgtacaccctgcgccacactacccgcaaatacaaggtcccccacctcccccgccagcccagaacatcctggcccaagtcccacccccagcctgccctgtacaccctgccccacactacccgcagatacaggggccccccagaacatcttggcccaaccccctggcctgccctgtataccctgccctgcactatctacagatactgggaccctcccccacctcccactgccgcccacacacaacatcctggcctaagtcccacccacttagctgcaggagcccctggcctgccctgtacaccctgctccacactacgggcaaatacagggggccccccggaacatcctggctcacccccactcccccgagctgcaggagtgcctctgtccccacaattctgggtctgcgccaccatctccagggagcccaccaagcacatcctggccctgtccctggctatgggagaccctccacccaggacatcctgcttcccccagctgcagggagcccctggaccaccagtaacgtctgtgaggcaaggctgacccctgctcagccagtgggtagaatgggagtgggcaggggctgtgggccctggcaagtatgtccactcctctgagtgcagggaggtacagaggtgaccagcctgacgtgcagctgtggacacagagggagggctgctgggggctggaggccactgcccagtggcagttgtgggggaggcagaaatgacctgatcgctctaaggtgagggagaggagagcccactctttacagagacttccccaatggcacaggcgccacgtggtcctggggccactgactgggcagacagcctggcacagggacaggacaggtctagcctgggatgtgctgagcttgatggatgcatgggacccaggaggatgtcacaatgatgattcacatggcacacaggtgaccatgactcttccctgatggagacaatgactcactgctgcagaaaggtggatctaacccctccagggtagcctaggagaacaaacagactccactctaaggagcccaggcattccatgctgatccacgcctgcccagcccggcggcatccccactgtctgtgcatggacaccagccctccctggctccagggcccttgccctccagtaccttggcccagctttggttctaccccaagggttttaaaacatttagaactgggagagaaactgttttctttctttccttttttttttttaagcttgtatgtggcaaatatctttaagaggaaataactcactcctctggctctaagagggaagtgtgaaattcaagagtaaaatcaaggtttggaaaaggctgctgtccccaggtaccagcccccaccccagcagtgtctccccacacaggggacgagggcacaggggatgaggttagagggccaccagtcacagcagaggaaagaccacactgagggaagctgggagctgactgtgctggaagttcaagaacagcacctcacctttaacacacctaagctcatgctgctggcacatggctgagaagccagggatgcattggttttaatacagcaaaaagtatcccccagggttgcaaaatgacgtgggtttcacagggacaaacagtgatcacattagaaaataatgttatttccaaacacaagcctagcatcatgcttttttcctgggctcattttcagaatgattcacagctagattaaaggtttacactggaaatgctggaaacagtaaccgggaatggtaagcatgccccagcacccacaggaggcccacaggacttggaggggacggtcgcggctcctggccatcctgagaaccatagcacttttgtcatgggccgcgtggggatgagggccctggaaacaggaagaggaaggtcaggagggctcctcctgcagtctctgtgtcagaggcagggacatggcttagcaagacaggtgacctcgtggaagcctagcttggacactcccaaccagtcatgtccaagcagtacagcacagggcgccttctcagacaagagcggtgagacggagtgggacagggagccacgttctccgctgcctgggccctcccagcactcaagggcgctctgcccctgcaggcacaggaggcaccgggcatgggccagacacccagcaagtgtggtagtcgagtcccgtgcccggctcctgaagcagggctcctgagtggccactttttcaggcacaaaatcctaacatgtttatacgagaaatagataattcaactgcaaaaaaaaaagccaatgttaggaagaaacgatttaaataaaatggaagcaagtagtgaccatagcttgacattttctaaagactacagttcgtctaggaacagaggcgacgtgtcaaattcaagagtaaaatcaaggtttggaaaaggccgctgttcccagacaggagcccccacccctggcagtgcctccccacacgggggacgaggggacaaggggacgaggtcggagggctcaggagagccgcatccggaatgcattctgaacgcagctgtgggccgcctgcctcctcttactaaagaaagtggacatcagagaggaagcatttgcaaagtctgatgacggctcacatggactaatgcagaagtgaacccgcagggctgacggacgcctcagggttctcgccccactctgagcacggccctgcggcctctctcgagcccacccactcctgaccctgggtcccacagggtgggggatgcaccgtggccccatgcatgggatgaagggcttgggccgggtgactggctggacgccttccagagaaaaggcaatgcgtggtttaaagcggaaaaaaaacacagctgaaaaaaaagagaaaaatataagacagagctgatgtcttaccccaggttgcttgtcccgggcacagtaaaaactttttctttatctttttctttttggagacggagtccggctctgtcgcccaggctggagtgcagtggtgcgatctccgctcactgcaagctccgcctcctgggttcacgccattctcctgcctcagcctcctgggtggctgggactgcaggcacctgccatgacacccgtctaattttttgtatttttagtagagacggggtttcaccgtgttagccaggatggtctcgatctcccgacctcatgatccgcccgcctcggcctcccaaagtgctgggattacaggcgtgagccgttgcgcccggcccacagtaaaaacttaaaatgcacctgctgcggccagcaccgaccatggctgtgaacagcaagcagaggcaggagcagaacccacatggccctgtgttccagtgggaggaaggagcagtcctgagtgccaatgacgatagggggccggacccaggcaagaggccagcatcattctgaaatgcgtaaaaacatgtgctcctttagagttccggagccacgaccacaggcagtgaaggaggcgccctgggtgtcatctcctgtctgggaacggaaaggtgttgtctcacttgggctgatgtgagaaaggaaccgtgcctgcaggaagcgtgcagagcagggtgcatgagtgggggaagaaagcagctcccatggctcacgccagcctggcgtcctgaaacagacccagaagctgcagagttttaaaagttggcacagatgcgtgctgacaatataagataaagggctctttctcacgatgaaacaggagtgcaaagacagtgtccgtttaagacgaactttgggtcacaatcacgggtttctgcatgaaactgatggtgctttgctgtcagctgtaaaacaaaactatgtgcgtgagcttctgtgtgtatgtgggtatgcttatgtggatgtttgtgtacactcgcatgtatatgcctgtgtatgcacttatgtatatgtgtatgcatgtgtgtacacacatattctcatacacacactcatattagaaacccaagttttaggacagaatgctataaaaaatgaaaagtaaagtcttttccgattttgaaccccccttcccattttgcaaagttaaccacaactaagtttcacgagtgcgtcattcggaaaattcattcggaaaattagacaggattacaggaacgctctcgatgactttgagaaaaaagccagttccctaaggtcagggctccttgtgaggtgagggcaggcatccatgctaagccagcccacgctgccctccctgcctgggagacggcacagcagctgggcctctgtgtcctcacctgtgcttcctggggcaaaggatgacagtgaccagaggcgaggacacgggaaaatgacgcttgggcctctactgggccaaaacagttggcaccatcacacccaggtcatcagaaggcagctgggggccatgggcctggcaccgtctccaaggcctctgaggcatccagggagacagcaggccctgtacagccctggccttctccatcctccccaagggacaggcactctcctgcacatcctccacagggtgtggctgccctgtgctcccaccgggtacactgcccagggctccttggcccaccccacccctccacatccactgcccggcaatggggctgagcgaagagccagtcttactgaatccaggcaggcagcacccagggacccagtgggcagcaggagcagctcagagaagcctgaggaacccccatccccgtgcatgtgtgcctggagggcaccaagggtcaagaacacactgcaaacacagccatccacgtgaggagcctggcaacgtgtgcaggcacacgaattcctgttctgcagtggccatgctggactcaggagcgaggctgagagggcggagtcctgctcctgagtttttttaaaaaatcacaactcaggtatttgtataaaaatgtggagaaaaagatggcccacttttgggtaaattctatgcagggccaccaggcagggaggggcagaatctgtccctggactcaaccctcatcataatcctctctgtggattagccagcgtgggcaggcgggcacccagcagcctcctccactctgagacagcaacgcccgtccaaggactcagctccaaggtgcacaggaaggcattatgctttccaggatgtaagttcttgccaactctggttccgagcagcagagactttagaaatggggaaaatgggccgggcgcggtggttcacgcctgtaatcccagcactttgggaggccgaggcgggaggatcacaaggtcaggagatcgagaccatcctggctaacacggtgagaccccatctctactaaaaatacaaaaaaaaattagccgggcattgtggcgggcgcctgtagtcccagctactcgggaggctgaggcaggagaatggcgtgaacccgggaagcagagcttgtagtgagccgatatcgcacctctgcactccagcctgggcgacagagagagactgtctcaaaaaaaaaaaaaaaaaaagaaaaagaaaaagaaaaaaaaaagaaatggggaaaacgcatcagaaccatagtgggaaatactcatacccacagattccaaggaaagtaccgagaaaaccctgggtgacagaaaccacttcatgactccaaaacgatatatgaatgtgtgactatgaagaacctcagctgaactcactaagatcctgtaccataccatttaccgctctctactaaatctatatccttgctttagccagaggattaaaacattgcacgtattacagaccctgatggctttgatacctcttttcagatcttaatgtgctgttttctgtccaaagagatacttaagctcctcactaaatctgtagttaaatgacagatgggctggctggaggaggaggtgtccccgcatggcgctaatccgaagacacacagcagcccctcccaggcggcaaatgctcacaggtaaatgcaggtactcactggtttatctcaactgggaacttagctgggtttctgcgggttcttgagtgtgtcagccactactggacccatttctttctttggggaagaaggctttcttggcttgaaagacaggctatttcactctgtggaaactttacaagaatatatcacatcaaagtaaaagctttgcaaagcaatgcttggtgaaaagcaaaatgtttctgcagagaactttgagaacgtttacaaactaaacccttgagccacacattgcagacatccagcagaaacgactggatgtacaaacacacctaattcctcagatggaacctctgaagtggcaacaaagcaagccccctctctgagaggccccaacacctcaagccaggatctctgcctggcttcggcccaagggagaacagctgcccaaagccttcaatctcgggaccaggagcctctcgatgaccccctgcccaagagccactgggagcagcttgcaccctgaggtctcggggaggaaagcaggcccctctgggcactctggcagtgccctgacatctgtacctacccatgagagtctctgccctgcttctcgccagggcagtgggtgcacacttttggacagaacacacctcaaccgggggctgcaactatgacagggatgacgaagtggcctccggggacctccagggaggggcttgatgtttccccccagggagccaggagggagtaggaaaggcaggaagagagagcatgcctgaggcagccatagctggggcaggagcagggctggggaagccctggaaaccacagcaggggttcgaatttcatccgggggcgtccccgctgagggcttccgagcagcagagtgcaggaggaagaaagcctgctgggagtgactcagggagagtgaccagggagagagcctggtggctgggtgggggtgaggattgaagaggaggaatggttgaggggcacagaatgagcgaccgtgtcccaagtcctcctttgaggggcacagcacacggcagctgacagcgtgtggcagacagagggccaggcagagcggcggcagaggggccggcaccgccccagccccagagtccagctcccgacacacagggagacgggggccagggcctgggagccaggctggggacgacctcaccctgtgtgtcaccaggaggggcggcaccatcgggctctcctgctccccgtccccttccataccctgaggaccagccgcatcaaggggctttgagcaaaagcaggcgtcctgggaaaatgacaagctcaaactggcctcaagaacttttcacttcagggttctttcagataaagtactttatgcattaacaaatctccatcttcccggaaatctattctcacaattggaagcgtgctccctacaaaccggacagccccataggccccgaaacagtgcttgcttctaggaattattctagagtcaaaagtaaggtcctcttgagagtggatctcaggtaactgtaagcccagctggcagccaggtagccggaaaagccaggctgagccagcacatccccggtgcagcttcctgcagcgagcggccccctccccacgacgcccccgggtctcccctcaccactgtcccatcgcaggatctcagcaaaccgttccctcccacgtggcagcccaggttgcataaagttgattcgggtcagaccagccccgagaaagcatcccttacaacaggagcgaagcatgcaccccagaaggcaacgtgcggccgcagagcagggagacccgtgcgcctacaggggaccctacaggggacccgcaccgcccgcgcgccctgtcccgggcaccaccaggccccgcacacgaggctcacccagagccgcggtgccctcccgcccgcgggccgcgtccaggcaaagccgctccggagtccccgggctgcgcgcagggcctgccaaggcgggcggggcccggaccagggacgagcgcggggaccggcgatgcgggtccagcctcccgcgggagccgaggtcggggctctgggaggcagagaaagggttgtgggcccggttcagggtgcaggggtctggggggaggagcagaacgcggggcggggatgggaagcggggaccccgaggaaggcgctgagggaccaggatgcgcgtgcgggcggcgggaagccggcgccgagaccgaggcatcgggtgcgggcggcggggacgcgaactgaggggcggccgcggggagggaaggcgccgcggctcgcagggccgcgccgcgccccaggccccctccccggcccctcctcggccgcgcctccctggccccagcatccctggcgtccgcgccggctcccggggccgcgcgccctgggcacccacctgggccttctgcagggcgctgaggcgcagctcgtgcacgaaggggttccgccccgggggcgccagcagccgagcgtcgctggcccctgcgctggaggcaggggcggcccggggtccgcatccccgcagcctcatggccgcgccgtcccgcggcgagcgcagccgagctgcctggggcgccgagcggggccggggctagctgggcgcgggtctcggggcgcgggccgaggatgcgcggcggctggagcgggccgggcgcgcaggcgcgggaggtgacgtgggcggagcgggagcgccggccggggcggggcgtccctggaagcctcgcctcccgccggccggcaggggcggcaccagccggagttccgctacctggtggtttctctggggtctgtggggggccggggccgctggggaccgggggcgcctcctgcagccactggagcacagggatccccggcagggtctgcgccaggagaaagggaggtcccccgggcccgcgaggctgccacgtcgtccccttccgccgctcggcccgcctgctcgcggggagggaggaaggggcgggcacgcgtccagcttacgcgcaaggcgggccaggccctgggtgccgagccccgggctgttccggcgaaggccccacgccattcttcttattcgttgggctcctagctcgcaccggcgaccctggaagctgccccgggctgagggagcttcttccagccgcgcctcagcccaggcgactcccgcctgaggtccactcgaccttaggaccccccagacctcgggatcccctcagatctcaggacccctcaagcctcaggaccccctcagacctcaggacccctccgatctcaggacctctcaggcctcaggccccgcagggatggcccaggcaggaggcgcacataggggccctgactgtccgtgctggttgtgcaggggctgcgatgagatcccagcgctttctcacccgtagctgctttggctcgggcattgcccttgtggtgctcaggagccgtgtgaggagccccagggtggggcccataattagccggagcgagagtaggatgggctcctgcctccgggtgaacacgcttggatttcagaactcacgcaggccttcggtcacagtgctcacggcttcctcaccccggctggccctgttggttccttcatggccaacggacctcacccagacagagccggtttgggccacctggccaaccccccagggtcctggctcctggggatgtcactgctgtgttggccccagctgggccccatcctcagcagacgccagggagtgccccgacccctccaatgaccctgcctgcgcccttgtggacctcatagtgcagcgggctggcagagacccttctgtgtctgagaccggggtgagggccaggggtctgtgccatccacatatcatgcacagagaaggccccggcaggccagacccgctgcatggccttattcctgccccataagagtcccagcccatattcctgccccataagagtcccagcccatgcctagcagcagcacctgtcccaagtgccacacccacggggatggggtgagccctgtgtgctggtgggcattggtggctctgtggcccagccaccagcgttgcacccacctcctgggcttttagtggccacttgctctgatccccaaaaccagagcccagcacccgaggccacccaaggctcctcaccgaactgatcatcaagaaagcccaggacacaa

SEQ ID NO: 339 - DNA, 152828 bp, Homo sapiens
  source 1..152828: mol_type = genomic DNA
agtacagtgagaaaataaattcctgttgctaaccagtctatggtattttgttatggcagcctgaattgtctttgacagttactaatccctatgcagcttttggtctgatgccaacacgtggactagagagaatatttaaaaatgcagaggtcattccctcttttcctcactccaggattgagtcacaggaggattttctgactcagagaagcagagtttaccttcataggaacaacagagatgtgtgtgtgtgtgtgtgtgtgtgtgtgtgtgtgtgtgggtgtcagagagagagagagagagcgttctcgatgagctctggcctccacagagcttggccggtggtggaaggtgagtgaaaggagagacagttccagtgtttgttcctctgactgggtccctctgggctgattgccatgggtcagctgacacccttgacacccaagggccgcagggtgatcctctcctccagccactctttggtgtgttagttttctagggctgcagtgacaaattgctggaaacttagtggcttaaaacaatacacgtttatcacctgatagttgagtagggtagaagtgcaacccgggtttcactaggctgaaatacagatgctggaaggatgcattcccttctgggagctctaggggagaattcatttcttgccttctctgcttcctagaggccacctgctgggattacaggcgtgagcatctgcacccggcatgcatcttcaatgtctagcacaggtcctgatatgtgagaggtattcacctggagagctgtcgtgatgatggatggggctgagtgcctgcaggtggccttggggcccgctgggaaagagggtccagagtggcgtgccgtgctcagggccatgtggggagtgcagcatcgcactggacccggctctcctgatgctctgcggggtgctgaggcgatgcagaggaacagagaggactccagaacctttcacgcgagacagtggtagagtacaaagtggaggaattactgtctagaaagcaccatttccagcactcagcacgaggtggtctttccctccacacctgccaccaacctcctctggagacagaatatcccaagacaaagaggataaatctggaaacaagtagagcaggagaaaagcatcccgggaacttcgtggccttggggaagttattcaatctccgagccctactgcctctgaggagctggagtggggagggcagggtacacagtgccccgcggctggccggcaggggtcattcccccctctctagtttccccttcacaaaggtgacagaaactggcatcttctggaagttttgcatcctggatgttgtttgtcagctggtccccaggtaggagagcatttgcaattcaacactctgctcttttgctgagccttgtgacttggccggggctcccgggactggtgtaaagggaagcaccgcctgcccaggctccagtgtcacccagcccagcctcccagcttctgagccggtgttgccgggggacatttctctcctgatgctgggtgaggaggcagacagcaccatacagggcgggccatgggggaacaggacggcattcgcagctccagctgggagacctcgcagggcaagagctccccagactcggcttggtcatgggtaagggccggccatgtggccatctgcaaacacagcccctgctcttcctccttccatccccaggtgcccgcgtactgatgggacccggggaacatttgcgcccagagcgccttgttcgggatgggtttgtgcattcacgcttccccagataggtgaccggccccgcttgctcctcacaggctcctattcagaaggctgcatttatagaggaggctgtagaacttattcaagaattaaaggcttttttctttgccttggatggaaaatgcatagtgattgcttaatcttcaaaatgggacttcagagcttcgtgagtgcctccagcccatcaggcactctgctagaacatccttgtctgtccagtttgtgtgcaggccaggaagcgaggtgtggagagttgaagggacccctccaatgtggtcatttaaccagtgctgtctccaataacatgctgtgtgtgctgtggggcttctgtggaccccaaagccagcggctgtccctactgcccttttcagatctcatcctagcagccaaggcttttttgctgttgttgcacaaaagtagttattttcacaaaaaagcccaaagcaggagtggagggcgttcgaataaccctgagtggcagtgagtcccgagggtagggcctgggctagaattcagaaccctgcagtttcttccagaggccagggggttgggctgcagtgaggataatgtgtcaaaccactgctccaaatggtgcgtcggggacacctgctgtggtcctcagctgcagaggctgagatggcagtgagagagggttcagcatgcttagggggcagggagacccggggttttctgcatcctagggggatagagtggcgaggcaggccaacctcccgctgctggaccccaagcacttgtcgcctgtcacttcagtcagctccatcctcagggcagtgccttccttcagggacaagaggtccttctggggctggtgtccaggcggcaatgcagtgagggctctctagggagaaaggaggcgtggatcctgctcccacctctgcactgttttgcagcttggccctttgggcaagtatttcctgaatggaccggaggcctgcaggggagagacatcaggctggtccacaacatccctctacatgatggggacaggagcaggaccttctctcgggagccccgtgcaggtgaatgacacccacactcagattaagtagaccatttttgtggttagtcagggattataatggctttgtcttgtttcctttgctggaatgtctcttaagtttgcccggtgctgactgagaatggcactcgcatcttcccagtggacaggtggggctcttatgaagctctgtctcatgccccgcaggactgactctctcgccagcctgagacgcaggtgttattatcatggcatctctctcacacaagcctggcaggtggggagcacagcatcgctattcccatttgacagctgagaaaactgaggctatgaagttgggacttttgcacagcaccttgggaggggagtggtggaagatggggagaggaacccaggcctcctggggcccagtccaaccctcgttctctcctgcacctccctacagatgtggaagtttggatttaatactgatttaatattatgtctgttttctgcttatgttttattggatattaattatttttctgattataaaagcatgttcattgtagaatatgtagcatatacaggaaagtttaaataacataaaagcctggggactttgtaaacagaggtggtgcttccttcaccgaaggctccttgtaatgaagctgcagagaggatgtcaaacccgccacgtgtccccttgtattccatcgctcttccaaccccacaaccttcctgtgtgtttgataaacgcttgttgacagatggacgggatactaagccccaggctaaaaccctcagcaggccccttggctgatccaccgtggtctagattcccccaacccctgccccggcagtctctgtgcggtgcccatggccttttgccttgggggaggcaggcctccatggctctgaagggtgatgggggccgggggagtctggcctgcttcctctcaagctgcagagctggcttcctgcaaggctctgcttctgaaggggcctggtggccttggccttggctcaggctggtgctgcacctggaggaatctggcctgcttgctgaagggtggctgcagagccgtgaaactgggagcgtcactgggagttgctgctggggactgagtctgggactagtccttggatggcagggagggctgggcccagagttggggcttcagcaaagaagagaaactgggacctagatcaggcaggcccccgatggactgacagcagtccaggaatgctgaggggggatgcaggagatgtgggtgggagaggtgggagctgtgactgccctggccagaagcccaggcagggctggctggcttctgggaagcgtaaaagtggctcagccaccatagggctgttttcattcctggggctggaaaatggcagctggcagcagcgtgagccctcggaggcacctgctaagttggcagcatcacctgtgctgttggccatggccattcccagagactctgggcttggtctctgcgccacaagtatttctgggccctgagtgtgtgcagagctctgtggtggggtaacggggcgatctgggggcggtgcgtgaaaggcctggtctctccctcttctgcaggaggtcaaggtggaatgggaatgggtggggctgcagctggcaagccacagagttcacagggcacaggtcaagagtgattcagcctggcagggctggaggaggcctctctgagaagctggccttggaggaggaataggatttcaataaacagagctgacgggggtggagctttctagctgcggggtcagcttgagcaaaggctggggaatgagtacagtgtgttcccctaaagctaagtctgcaggggttgttccttggggcgttgggactttatttttttcttagttggggtgtgtgtggtgacattcgtcttggtcaggcaccctgcctatgaaagatagcaggcagtcacgggccgaatatgtaagacccagagtgaaggccaaagttcgggggccacgaggcctggactcacaccctagcattgtcagttacaacttttgatttgctgaaaatgtagttgtctcatctataaaatgaagcttataatacctaactatatactactcacaggtgcttgataaatggtagctattattaataccagcactacacctgaaagcagatggcctgtggtgacaggctggactgcaaatacaatggtgccaagacactgaatccctctacactggcccagtggactcagagagcactgtaggggaaaatgcatggagccaggtcctgcatttgtctctgtatgaagaactctgagttcagtcttcctttagtcacttagcttggcattcaaggcccctcaaaggctggccccacctctccgcctgatatggtttggatgtgtgtcccccacccaaagctcctgttgaattataatccccagtgttggaggaaaggtttggtgggaggtgattggatcatggtggccgactttccctttgctgttctcatgagagatctggttggttaaaagtatgtagcacctccttctattgtcttcctcttcctcctgctccggccatataggacgtgctggcttccccttcgccttctgccgtcattgtaagtttcccgaggtctccccagctatgcttcctgtacagcctgtggaactgtgagccatttaaacctcttttctttataaattacccaggttcgggtatttctttatagcagtgcgagaacaggctagtacacccccgtcggctctgttctttccttctaccacgtccccgtgctgcccctgggacgtgctgagccaggcgtgttagttgggtctccagggaggtgaccattcaggaccctggacccattttgtcacctccagtccatgtaggcttgggggttggacttggggccccatctactcagagcttttgtttgccacctgggttcatttggcttcaccaaccagaggcctgaacagaggctgggcgacgtcctctcctctggggcccctttctacagggacctttggagcgcacgcccctgacggtggccgggtgtggagacaaacccagggaaagggtccacttctcccataccgcgaaccccctgaaatgcctgtgtgggctgccccctggtcctgggagggctctcgggaggctgctacctctggccggcctgaaggcactggcgcctggggtgttcgttgtgggtgagatggaaacagagaagaaagctgcaggcctccgtggggagcggggctttgggcctctctctcctctcagcgtcctgggcttgccccactcctcctgcaggtgagccgtggggaggccttgagcgccccctggaggtgacactctgccactacacataggaaaccacctggaaacccaaccacagtgtctgatgtgacttttcttagtgacaggaaattaggatgagcacgagcaaagtcggtggtcacaagggagcagccaggccagtcctgcttaaactcctgctgttacatgtttgcgattgaactcgtagcaagctgccgatggaacacaacctgcctccggcacagacgccgatcttcaatcccttctccccagcaccggtgacagccctagtcatccttcaaggcccagttcaaatgcctccatctccataccatttcagttcgtggttggggataggagctcccgtcgcgatcgtcatctttctgctgcagacagattttgtttccctctgtaaagttggagtgcaggggacaaggctctgaacatagcatttaagtgacagagatggttgtggtcatgtcccagtatgtatttatctatctcctgctccagtaaatgtcacactccccggggcagcgagggtgtcaccatctcggtgtccccacagcacctagcacagtctcccagacgatccagggcagacccttcgcatgggaacgcaagtccctgtttgtccgggtcactcaggtttacgcctattgtcctgtaattatttatgcaccctcttttgctgtcataggtgttgggttggaacagtcaccctatttagcacacacctattaagccaaagcaccttagtgtgtaggcttccctcacccaaacctgttcccaaaggtcctttctcaccggctactttgggggccccagtaatcttcccgacccctctggtcagggccagagtggggagcaagtgtctaaagcaaggccttcaacaaggtcccttccctgagagactcagtttgtgacgcttgtgattgtgaagctcaaatggattatgtgactccacataactctgcaaactgtggtgcgccctattattgccgtttaacttgtcagtgtcggttctgcacccctgcaggctctgtaggggctggagaagaacacttgatttggaatttcggtaatagccagtgagctaagaaccacataaaataatgcagatcatatgaaatgcgtcatgtgtcattttgtcttctgatatttaaacatgctcaagtgtatggtagagagcgtgagagaatgggctgagctgggctgggtatacttgaaatgatgactccagacatgggagatgggagcggctgaagggaggcagcccatgagtcgccctttgggagcagatggcctggagttgaacgtgagggatggggatgagggactgagaaggaagaagagaaacagggaggtctgagatggcttttactctgggaagtaacgggtccgcccttctttgtccctgcctcctgcctcctcctggactctatgcagaggagagaagatggggcgtggcttccccccaatgctgtggtcgtcgaggtaagcagatttgccctgccctgccctgcactgccgctctgttcctccaggacggctggtgtttatgtgaacatcctgctgcacctgaggaagggacaggtgtggtgaaagccaggctttgtcatccaggtgccctggcttggaatcctggctctgctgcttctaaactgagctgtgaccttgcccaagttgccttgagcctctcccagccctgggctcttcatctttaaactggggctgatgacgctgctttaccagcccagcatgggggtgagtgaggtgagctcggaagagtcttcttacttttctcatagcagctgcatgaaaggtggattagaagaagctgccaggcaaagtatccatttagtgaaaattcagtgtgaactgtacagtctgtgaacctctggcaggtatcacgctgtctcttgtgatccgaatggcagctctgggtctgggctggcttctggagctggagcccccacccttcccagtgccaaggctgcttctgacgtagtaagcaggtgtgtctgctagagcaagggccagccagggtgatggactctcttgtctcctgggctcaaccaatcctcccacctcatcctcccaggtagctgggactacaggtgtgtgccactgcaaccagctaatttttttttaaagtttttgtaaaaacaaggtttctctatgttgcccaaactgatcttgaactcctagcctcaaatgatcctcctgctttggcctctcatagttctggaattacaggcatgagccactgtgcccaactctcttgtttttgaaggaagaaccagagtaacacagagctggagggtggttggcatggagtattggtgccaaagttttcactgacccgtggtgaacaaagaaaataagacaatgttgtggggtagatatgttcatgtgacttggcccattcaaattccctgggaaagactattatttatcctgggagaaggcattttctattttggggaggttaaagtatcttttatgaaaagaaaaatactttccttccatccctccctccctccctcccttccttccattgtttttcattttttaagattaaaagttgacaaccttatgtcagttaccacgcatgctccctgaaatgaaaattgtaaaagattattgtcttttcactcatttgcttattctagtaataaatattcactaggcgacactgtggccggcactcttctaagcactggaaatgagccgtgaataaaacaaacatcctgccctcctggagcttacagtccaggtgggggagaaaagaataagcaagtgtctaagtaacatgcatgtcagatggggagaggggttgtggagaaaaagaaaatggggaaaggcaacggggagcccgagacgggaggatgacgtaattttcaatggggaggttggggaggtcacagagaaggtgacatgtgagcaaagacttgaaggagctgaggagtgagcggaggcctcaggaggtgtcaagggtcctgaagctgaagcatcttggcaggtttgaggaatgccaagaggccagtgtggccagagctgagaggacgggaaaagtgggaggagatggtgtgagagcggtgtggaggctggcggagcacaggccagcatggaggcattggcctcgaccccaccttggggtgtcatgttaaggggacccacctcctgggctttcggggcagggcagacatgatggacctgttgggaggctgttgcaataatccaagtgggaggggatggtggtttgaactaggtggtagcagagaagggttttgaaccatttactcgaataaactctttagaattttattgtgcctcagtttaccttttaacagaattcagatgagaaatctaggctggagatacaacttcagtccctgaaatacagagtttaaaaactccagatctggtgcatccttttgttttagagacgggttaccgagtccccccagagggtagcaggtgtcttttctaggcatgcctatggcagagctaagactaacagtcacttcctgatttcccatcgaggaatgtgtgtaaactcaggtaccattttgaacttccctttgcatttagatttggaatacacttggtcttgtttctcgttccagagatttccctctgtttctcttttctcagcccttcacattctccccgtgcctctgcttatccaaccccatttcttcttttggggttgcattcaattgatagagcacttggacatcctgggagacagattgccaccaccaatgtccagtgacccttccaggccttgtgtaagtgcagccttctccagccgcctggaaaccccccagctggtgggatacctacattctcaaccacacagcagctcgcttttagaatttggcccctactttccattgtggttatgttgggatgggccactggcacacagcaagcgcctggaacttgctgaagaaacagatgcaggaatgaaatgaccaggtgagcgtgcctaggtctttggtgagctttggcctgttctgggcttcatcaatgtgctgaggatccccgaccccgcttttggcacttatcatgtgatcacccacagcccctgggctgtccctttgagaaagccctgcccagcgtgggtgggatgtgcctggagaagggggaaccagaaagtgggtgggcccaagagcaatcaagaggtgctctgtagttagcccccagggtgaaacaggagaggagggctagaacgctgggttggacggactccgggaaagatggaggctggtggggaaggacggtgctggagggtctggcacacctgaggcctgtgtgtattggccctggacagaggttgtgtggtgacttttgtggatgggttgtcctcgtttaaagggacaggaacagggtgggtagccatggcctgggcaccacgggcagagcacacacccgcgggaaagagcactctccttctcatgcgagcgagcaacgagatgcctgtggctgtgttccgagggggtctgacgctcaccttctgctctcatcactcctatgtgaggacccatgaatacgcccctcacagtgtttgcagttggaatgtgtgtccattagtgattaatcgatatgggtccttttgtgggtaagtagagcccaggcactcacctttcctcttctgccccagctgctgggggcagagttttgtttggtgctcaaaggcaggattatctgtggtctagatttcaggaatcattctctccactccctcccagcattctgaatcctgctccatgtcatagcttttgatcctttttttttttttttttttttttttgagatgaggtcttggtgcgttgctgaggctggagtgcagcgtgatcacagctcactgcagcctcgaattcctgggctcaagtggtcctcccacctcagcctcttaagtagctgggacaacaggtacacaccatcatgcccagctaagttttaatttttttgtagaaatgggatcttgctctgttgtccaggctggtcttgaactaccgtcttcaagtgatcatcccaaagtgcgtgagccactgggcctggtcctgatcctgatctgtttttaaacaattctattacccagttttgtttttcatcatgcttcttgagatccttctaggccttgataaagtatataagaaaataatactgaaagtttgaaataaatacgactgtgagactcttgtaagttgctctgcggctgggctcagggaggggcaggcggatgtgatatctcctatagcatggacagcaaggcagggacagggggctttgtctctgaacttgggaagagtttgttattactaggatgaagagaatgagactctgtagaggggagaattgcatttagtaggagagaaatacagagaatctgaacagttcagagaatctggctctatccctgaccaagtggttttgaccaggcctgcaatacatttgtagcaatgacaccttccccatagggctgtccatagactgcgtgagaccctgtgtggatgctgcaagcacaggggtgccctcaaaagtagccaagctcaccaacactcacgggggaggcagcattggagaccagccttatcaggtgggtggcttgtgacatgcacttttattaaatgaggccatggcagggccgcagctaagtctctgcagtttatggtctgcatggtgtgctggccgagaggacaccgggggctgaaacccaacctgtgcttgactcatcacgccctccgggctctgggactgaagctggctgggacattgaaggggaaagggcaccttgttgaaatttgtccacccagaggtcctctttgttaattctgcctggagggactctgagtgtcagtggtggcccagggagttgagcctctccatagttctcaatgcttcactctccgacgcggaattcttgttatagctgaaaatatctgcaggtccctgtctataaatggaataagaatggagcaactgctggagataaaaggacggagagcttggagccctcccttctcaagcttcctttctttttcctacatcaaccctgccacctccttgccagctccaccctccctctccccacagtcaccccagggctccttgcaacatcctttgaaactcctagaggaagtaacctcccagagctaccactctggagttgcaggctagaattcttttcagagcagcacggagtaacagtcttcagacttcaggactgagactctctgcatggcagtggctgggaggatccagtttccacgccctgctgtatttttcaggccccgcctgttcctcatttaccccgtaaaagtgcagcccttcgcagaaacatcttgcggtcgctcgggtcccggtgtcctggcccagaaataccctctagagggcgctgtcacgctgagacccgggacaggacgcaccggcgcgaatcagggcccctcgccacaggggagtgttgacaaatggaaaatgagttaatacatacaacattttcagccgataataagagagttttgttgaaattcttgagtgaattctctttatctaaggataaggtgatttgagtttcaaaacagttcaaaataaaggagaaagggacttggctagtcggtttcttcacctgatttgacccaggcagaaattgagttattaatagccatttgataggcacttcgcagttaatggtgaagcaagacgggatcaagttctagtttctacccaattagaaatgcccactgggtgagaggtcaccagatacaaagaaaaggaacagcaagtcttctatgctgaacactgaatttgagcagccgacttgtataatggtattttgcaaacacgacttattccaaatttatggataattcgaagtgcttcgaaaatgaacaatgtccaggttgattattgtttttgtttaccgagtgctctctctccatgccagggccctatgagacattttccatattttgtcctaccgatccttgtaagaaacacacaggtgattcttagcctcagtttacacatggaggagctttgagagattaatgaactgccctggtcgtttcaaagtattctgattttttcgcatgaattgctgatggctaaggctttgccatctggaagttctacaatggacttttgaggcttagtatatttgtcttcaatatcatcttgttggttttagacctgacgaggtcctttcagattttgattttgttatccaacatactgattttgtgacttttaaaaatctgactgacttgctttcttttcttgacttctgttgaatttataattttaaaatataatttttctatcctcttttctgtttttgctcagttaattccataatcacagaacaaaattatattcttttagtggttctccttagcttttgaaaacatacctataggctgggcatgggggctcatgcctgtaatcccagcactttgggccgaggcaggcagattgtctgaggtcaggagttcaagatcagcctggccaacatggcgaaaccccatctctactaaaaatacaaaaaaatagctgagtgttgtggcgggtgcctgtattcccagctacttgggaggctgaggagggagaatctcttgaacccgggaggtggaggttgcagtgagccaagatcgtgccattgcactccagtctgggtgacagggtgagactctgtctcaaaaagaaaagaaaagaaaacatacctgtataacaaatattgtctaacacagtttgaatttatttattacttctatactcctgccaaacagggcctaggcctcagctcactttgaaaaccattgggtacacccttattttattagtcttgtccagagttttagtttttgttttaaagaaaacctaaaaatttcagttattgttttcagtaaaaaaaagaaaaatgttaattataatatgtccaacctcttgtatctttatctacactttttgcatcccaaaccttttgtctcagttcatgatttcatggttcttctagggactgtctatggaagacaaattcctttagtttttgtttatctgaaaatgtatttttttttgcactttcttttcttgaatggtggtttagctcattataaaattataggtcaacagttgctttccctcaatatttaaaaaagcattagtcttccatgagacatttaaatattatcctttgccatgtgtgctctgtgtttcactgtaatgtgtaggtgtagatttatttttatttactcttcttagtgttcagagtctgcttttttactcatcactcgttcatcaattttggaagattctcaaacatcttttcaacaacttcttctttgtgatctccttaattctcctttctggcacgattagacacaaatttgaacctcactgtatcctccatgcctcctagctgctgttttacttctttcttaatctctttgacttgctgtgcctgctggatgcttccttactatattttacttcattaattctctcttttatgtttcctgttaggttttatctactatattgatatttatgttttaatttcaatgactatgtttttcatttccagtatttctaatagattcttttcctttatttcattgtttaatttttgatatgtttctgtttcataatttctctttttaatggaggttattccttaatctgtgtctatatgtatctcaattattctcatttaacagtcattatcagattgttcaataacctgataatgactgttaaatgaaaataggatacatcatgatgtaagtctatattccaaatatttattttgtgtgctgtccttagcattagacattttgcttgagggctcattttgagtggatttaaaaatcttgttgtggtttttttttttttttctctctcctttaatacccctcacaccaactcctagtcctttgttctctagcaacaaggctgggtgatttgagggtccaccctcagtcctgtggtttgtagttgcctccccaggtccgggggcacagtccagagccaggccttataacagcacttccaagctcccgtcttacagtgatatggggaaatctgggctctgaatgaagcagcctttggtttccttcctgcttgaaaggttgggtcacttccctctattgccttggccctaagcagtagggctgcagacatgtttaagcctcttttcaccagcataggaaatcccttcccaggattaccttcagtgtgaagcctggctcccgtgtcccatctatgctttcctcctcaggtgctgacctccagccattacctctttccaggccagagactgtgccgggcctgtggcttcagctccattcaccatgcacacttctaatctgtctttggttcttgcacactgactgctgttggagcccggctatgtcatatttgcttatccattgatatactgtgggcttggatcagagggggtgattcaaaatacaagttcactataccatcttgaccatgagccacaagcatgctttctctcccacttcaatattgatcaaatatctaagaaggaaagaaagaatagagccagtggcctggcatgagaagcctccatccaagttgatttccatatttcttagaaataggaatgtctaaatgctgtgcttgatacactattacccaacccaggttatccaactatcctttagagcatcatgaaagatcttatcaaatgcttctctgaaaccctgacctacaatgcgagtgtgtgtgtgattcccttgatttgccaatctaactattctatgaaaatggaaagccttttccttagcagagttgttactgtgagttctgggggctgtcactttcttacaggctgttaccctaaccctaacccttgttttccgatctgaagaatgactcacttgggggaacccaggatgaagtccacacactgaacataccttgctgtgcatcctaaggaaatgctggcatatgtaaagcaaaaaggcatctgtccttactgccccagggattttgaatatttttgctttctgtgaaaatgccactagaaagtttggtcccctttccttcttgccttggcacatacttggcacatacttggcacatacttggcacatactggctgtgtggcttcagtaagtcactctgcacttgggtggcgtcatctataaaatgggttgctgtgcagattaaacaaggcagtgcagtggttcccaaatactagaaactcctgggagctttgcaatgttccgggttctacccctgttgatgttgactcagtagatttgagtggggcctgggaatatgtaacgctagtgaattcttcagttgaatctgatcttgtggcataagtttctaaagtgcttagcaaatagtgcttagcaataaggagcacgatacgtgccctacacatgcgtccacctccttctttcctcccccacctgctgtctcctctgctttcctcccaggtacatggtgctctgggtgttcccagtttgtgtcacaggagaaaaccataggacaaaaatcatttaaattgcccttctccagatgtttttgatgaaaatagtcagaaaaaaggacaatgcttacctcaaagttttcatttaaattctacctccagatatcaggcctatcctcttccctttgttaagccccatgatacagagataaataggattctggctctgcccctgagatcttaggaatatattttcagcctgagaaatttaaggcattgaggccagctgaagttggagagaaatattatttttgggtagggactggccaaatcctaccctagaggctttctctagacttgggcccagttttgattggaaggaagattcagggtcactgtgacagacaagatgggtccgataggtggagctagagagtcggagaaatagaaaaggcggggcactcgtcctcaaggtcccagcaaggccaggtacagtcgtggtccaaaggtctgtcagaatcacctgaacaacatttttttttttttttttgagatgatggaatcctaggtccagctgaaatttctggcattgagccttgggcatgtttagcaaattgcccatgtgactctgatgtgcagccaggcttgggaaacactgatctggagatcccagaattttctaacgtgacccgggcactctgctgaaagatctggtcagcagtctgagctggtctaaatctagagccctgcactattcggaggagctaatgagaaatgctgactcccaggccccaccttggacctgctgaatcagaatctgcattctcaacaagcacccccttcggtggttcgtagtttcctcgtggtgtgagtggtcacctggcacagagcttcttgtttatatctgaaactatccctaccatgggcactccctgagacagggatcacattttgcccttggcacctctctgagcctcaatttcctcatcttcaatgggggtggcaatgatatttgctgtacctccctctcaaagttcgtaggggcactaatgtctgactcccacattagattgtgaattcttgggggcaagagccatatatgtgtgtgtgtgagtgtgtatatatatatatatatatatatatatatatatattttttttttttttttttttttttttttttgagatggagtctcgctcagttgcccaggctggagtgcaatagcaagatcccggctcactggaacttccgcctcctgggttcaagtgattctcctgcctcagcctcccgaatagctgggattacaggcctgagccaccacatctggctaatttttgtattttagtagaggtggggtttcaccatcttggccaggctggtcttgaactcctgacctcaggtgatccacctgccttggcctcccaaagtgctgggattacatgcgtgagccaccatgcccgaccaagagccatatatttttaaaatttctgcatgcccaatgcctagcattgcatgaattagtcattttggaacagaatgatagaacccttgaaacagaaaagacttcatagattgtacagaataatccactccaagaatgtgtgaagaaactaaggtgaggtttaggttgttattgttactcgagcctatctgagaggctcatgcaaggattcaaagagcacgccaccatggcttctagtctccatgatgtccttcttcttccttgactcttcagagctcagctctgctccagcatcttggtaaagctcctctgacccctctggccactgccacttccgtgccctctgaacttctgcagcattgagtgtctgtgtcacgtgtttgcctgcaaatcctgggctggtttccttctaccttctgtccttgtgtatgtatctgaagcttgcagcgctatatcataatgcacctaccaagttctctgaagatgagtccatggtccttggtgtacccccatctgcttcccagcccagcacctagcacagggctgagcacatgataggcatggctaagttttaaaatatctgttaattttatactctgggttctcttcagattgcatgcatcttttgccttttactaaacatctgttaattttgttaaaatataaaatctctcacacatacaaaagttataagaaataatataaaaaattcctgaatcctcaccactacgttaagaaatatacaagcagtattacagccgaggttctctatgaacccattttctccacccatttttctcagcatccatgaatctcgatgatcatccatcatctgggctgtcacatggcttctttggtgctcctgcccatgaaataaatacctgaaaaccaaggccccaggtggtcatgaggctacagttcattcaattcagtcgctgcagaatatttattgagagcctatgatgtgctgatgactgtgttgggaacttggagtactttggtgaacaaatctgccaaatataatatatcgaacaaaacaactcaaaagtaaacaccgccttcatggagttcacatggtgggcagttcataaacaattaatatagtaaatatgtaaatgatagaacatgcccaaggctaaaagtgcaatggaaaaaaatgaagcaaggtacaaggaccagggattcggacagggaagggccaaccatggtcggcagcttcattgagtagatgagatctgaatgagacttggggatgagggagctggccatttgattttggaggaaaggagttgcagggggaggaaaagccagtgcagaggccctaaggtggagtatttgaggaatatgaggagctcagcatggctggaatggaggcaagagaaggcatctagagatgcagtcagggtatgagggggaggggaggagcagattggttaacttcaggttctttcctcacatgggttaaagcagaggggatctccctattacgccagcttagggtagctgggccccttttgactgattgctgtgaaattctgtttttttgttttatttttgtttttgcgggtggccagagggaagctggcctgtttaaggatttggctatcatctctgtcttgatttattggcagttcagatctcacaaggaaacagcttaggttttggtttggtgagtggaaccttagcatgagtgactccattttgggttggtctgttgggacctagtgcaggagctcagtccaaatcagtatcctcccatagatttttttgaccactataaatgtggtctgagttttgaagtataactgataaaacatgtttctcctctctacccagtggccaggccctttcccactgctgtgaggtcggcagcatccttcaccatcctatggctctgacagttgctgactctccttttttttttttttttttttaattttactttaagttccaggatccatgcggagaacatgcaggtttgttacataggtatacgtgtgccatgggggtttgctgcacctaatgacccgtcctccaagttccctccccttacccccgcccccaaacaagccccagtgtgtggtgttcccctccctgtgtccatgtgttctcattgttcaattcccacttatgagtgagaacatgtggtgtttggttttctgatggggttgctgactctcgaatgagctgctcgagggaaggataaggtgcagttcatgccagaatccccagcttcccatgcaggctggggacatagtgggttctcctgaaatactgggtcacttgaatttgatatgatgtatatatattcacctctagtccataggtacatatagtctatatattaaaaagacattggattttgacttaaactagatgtttctcaagcagcaccaagacggtgctagagcctgggtttggccagagaattgggtcccggtcagaagtgagtggggatggctggcgagcaaggtgtctgtagggcagcacaggatgtctggtgagcagacagcaagcttctgtcctgccccgagtgctgaggagcgaggtgactgcctacatggtgatgcaaagatttgggcacgcttccggctttcaggccaaacaactcctcgcttgctccatggcaccactgatcccagcagtggcccgagggagctccttcctgctgcttcatgctctgacactttggggggctcctttccccaccacgtgggtctcctgtcagcctcgaagtgtcctgcgcccctccctggctacgcccaggtgtgcctcccctggccgcacctcctctgtgctcctgcgtctctctgttcttctttagagtggttctgcacgtcagcagcatctgtggtgtgggcctgggacccttcagaacaggggctcctgcccagcctctgggtcccccacctgtggcccagggaaggctctttgttcctcagccccaagctgtatctggtgagaacagatgcgtagtcccggagctcaagttctgggaagggcagtgcccttttctgtggggccctgggcttgttctgcattgtttctaagaggagctgccactcaaataggcagccctgcaatcggagggctgcgtgctccccctgatcagcccccagctgcttctggatacaaccgcactacccagatgcttcctggcctcgcccagctcttgtgctcctggcagccctgagctctgtctttgctccaggctggaacagcaagcaagcagctcctggtggcctgtggccagtgcaggaggaacaggaagcagcccccgtgggccactgtggggctgcaccaggagctgtgctcggctcctgcttctccctggtttggcctagaagctggaagtctgcccgaatctgtgcgtcgtgtcttgggaattcatcccttcctccctagcacttgggtgcccagtgcttgctgaaccgtggtgacctgctgactccttcccttgcctgccactggtagtgacctggcctggggacagggaaaggacgcccattcattggcagggtgagtggagaagtgcttggtgggctggttttgcagccactgaaaacctgaatcacactgagtcatcctgttggccttgctggtgtgtgagtgctggcagagtctgggtaccaaatgccccgggccttgtgtccttccccatttacaaccccctcctccccatctcaccaggccagggaacaagccctaccgcacattacatggaagcgagtgtgctcagaaatgcaggttctcccgaggggcagccctcagtcacaagccagactagtcacgcacccccggctgtgggtggcttcctgacccagaagtgcccagttttgcctacagtcctggtggagccggtggtggtcagagagtttcactgtctccagcgctgtgttgtcgtttctgtcaagcgatgggcccatttctgtctagagcccctctctcaggtcctgatcctgctgggatgttggtgtctgtgacccagaatagctcagtcaggggtgtgcggggcggctccggtggccatcctcacttgacgtcatggcaagccctgactcaggctgtctgttctcccctggccgggcccagatgagccgcacgtggccctcattcctgacagctttgctgcaggttgcagctgtctcaggagaccagatgctttgggagaaggcactggatgtacttgaagtcaaggggctgtgtccgagttctgtatttaaaaatcctctttagagtcaaggcttctgtgactggctgccacgtcctacgcctcttccgggaaacgtaggaacagcacacagtagcagggacaacaccacgtggctccaacagtttcagaaacagctgtttcttcatgttcctggtgctatttctgcagaagaacccactcacgtgtgagctggtggatcaggcccaggttgttaaaagctggtcttctagattgcccgacaccatgcctctgaacacggagtgaattcctttcttccgcgttatgaaatacacagtgtttttatcaggactcccgctgctgggcacttctatttaaacagaataagctttgttgattagggtccttctcatgtggaatctctggtattttggacgaggtcagggctttgcacattttgtgagcagaaggtgggtcagggaacttaggagtctaaatgatgcctatcagctgtctctctggtgtgtcagcctgagccagtggttggccttgggcccactgcctgagctcacaccctgcctgtagaacttgtgcctccttcaaatcagcgtcccctttggggaaaatatatggaggccatgaatcaagcttggccaaccaatggtccgctggccgtatgcagccagggatagctttgaatgtggcccaacacaactttgtaaacgttcttaaaatattatgagattttttgcaaagaaactcagtttcttcaattaaaaaaaatgcaattttattttgtttgtttagctcatcagctattgttagtgcattttatgtatggcccaagacaattcttcttccaatgtagcccagggaaaccaaaagatgggacactcctgctataaatcagtaacgggtcctcaggaactattgaacccccatttacatgcaaaatgtttgtacttgttaaaataaatccacataaggacctttctagggaacactttcttgctgaggataagtccttacatgtagttgaaaacagtgagatatgtcataagttgatgtcagggtcgacccacagcttagacttgaccggcgccctgatgtcagcgggtatgggtatggagtccctggggggggcgtgcggaagaaagagcagaacagggaggaaacagacaccagaacgctcaccttttacggtgctagtgtgagtcatgggagcacctttccttctcggtatggtttcgacacctgttagatgcagcctctctggtgaagccatgtcgccgaggaagcatgaagatggtcttgggtatcggttgactgtgtgcagtcacgccagccactcactgtttccttagacattcaccatcggacgaagggtcactgagtgaccaccgtgtgctgggctctgaagaacaagaagcctgaatctggggctgcttttagggagctcccagcctaatggggcacaggcaagcaaagtgatataagcaagggcaatagaaatgactgattccgcctgcaggagacgggctgggggagggagaggagccggttggctggacaaacggtaagctgtgtggctttgggaaaattactcaacctttctgaaactcagtttcttcaattaaaaaaaaaatgggatgtaatacccacagcatttggagaactaaatgaattgactctgggaagcacctggcacagcccttggcacatggtaggtgtgtctttctttgattgttattctaggcagaggaagctgcctggtggccatctgtctgccttggtgcacagggtgaagtccctgcaagtgagcccaatggcctctgatagccatccacgtgtcaggtgtgactcaggttctggaaggcctgtgtccattgttcatagtcacctgcaatccaagaacccactctttcccaggtgaagcctcaagagtctgcccaagtacagaaacatagctttgcatcccagggtactcttagacttaaacaacctcagtcaggtggtgcaatgcccagtgtctatggggcatctcccttctggggtgagctgtgtattaaggctgcccagaacactggtttgtgtgaccttcacaacctgtctcatcctgacctctggtccattgcactatttctcattttctctctctctctcagctctctctctctctctctcgctctcattctctctctctcgctctctctccctctcccactctccacccctatgggctttagtgccagccccagcgcaggcctccctgcctctctggaggcagtatcacagataaggaagggtgagggccttggggctggacaggcctggattcagtctccacttggccacttccacagtgtgtggataggctgtatgaagccgctctgagcctcagcatcttcatttccaagctgatgctaattaaacgtccccctgggcagagagagaggctgaaggaaggtataagtatacatgcccagcacagcacggagcacacgattcgtcctcgctctgtggcagctgttgttacccacatccctccacctccccagagccactccatatgcctaggctcccagacagctcctctgcaaccaagacttgggtcctttgtcactgtcctgggcgggatacctcagtggagccctcagttctcagctcttctcctgaatcgcagagtctaatctctgtgcagcctctcccttccttggccctgctccccctcactctgtgttctggtgtcctcactggctataaggccaaggttattcttgtctccttgaagcctttgcttcttgacacatgctcccttttcctcctggtcaactcttacctgagctcttcccagatgtctttcctgacccctccccacctttctctaggaggtttttcccctcctgggtacctggccctttgtttgtgcctgcatgcagcacgcatcatgttggattacagatactagtttctgcatctgtttttcctgcttggctatgagtaactcaagtgatcctgtcttagttatcttcgtaattaccccactgatgaactcagtgcctagcacaggtcatgacacctgatagatgctcaatgaatgtgtgactggacttgcctaatccagtccctgctggtctctctgctctgaaccgtgacaaacactcatgcttgtcacagcgccggcccaggtggcacacacagtagactctcaatacaaatgagttaatgcatcatactgttgctatttagttctatgtttcagtagtagtagtaataaaaatatgacattactgaatgcatactatgtactagtttctatactaagtactttaccctcattctcacttaatcctcacgacaacagtacatcatcatctccattcatgaaaaatgtgaagcaaagaaaagttaaatgactaggtcgaggtcacacagatagtgcctagtgggcctaggatttgagcttaaccagtccgattctaaagcctgtgtgtttagattacagaaagctgctggtattatccgtgggtgtagccggggctgccatgtcctttcctactggctgagtgtctgtttggtttggtccgtgcttgtgctaaaactcttcctgaactattctgtctaatccctcctgcgtatgtcaactttctgacgtcattgtgctcatctctgctgagttctgccttctggtcttgtggctgtcggatgccaagtgtcttaagagtactagagatttgttttaattgggtatgggaagacagacaggaaaatgactttcacgaaggaggaagtttgtggtgctcacgggtccctaaagacaggaggcacgccacgtcacacaaggccacatggggaagcactgggttggtcacgaggcagagagagcaaagggaaaatgtggacaagagtctttattgtggtttctgtggaaaggaacaggtgaggcagggtaaacgggcttagggctggctagtgtgaataatttcagtgggttccggagtacacaggctgtccctagttgtctgatcccaggccctggggtgaacagcacagtggatagtggcccagagggtgacgtcctgacaaaagaggtgattggggtctgggctctggactggttggtttgcatgtgaaaggtgcactcacagacaaggcctggccctgggaaggtctgcaggccagccacaccctggatagcaaagcatcaaaatacgggaggtaaaaagacacaggtaatatgtgagacaacgcggatgcttgagaaagggaaaccttgactgacttgtcatggcctagctaagaaggaaatcttcatgcatgcccaggaggctttttgcaataaggactgcacaaagaatatgcactatgctaacagtaatgttagcagggcaggctgggtcaacctccccttgctctgacctcaggtcactctcagtctctatctctctgtctctgcttctctgtctctctctgtctctctgcctctccctgtctctctgtctctcctcactatggcacaagctactcttgtttgccaatcatttttattgcccttcttctctcctaactctcacgtggatccttttctgagtctcgccatagacttgaatatctcgcaccttatcttccccagggagacagatggagatggaagtgtggatgaccgcctcccaggcttggatatttctgcagcaagatttctccaaaatgagttacctgacatgcaaataccactatttgctcagtaagaaaggggtttcaagattagaggttttggcaaatgcttcattctacattccctgttagagactgacaatgtagtgatgtaataaaggcattgaaaaactactagggaaaagtcatctttatctctgttttatctagtgtttccaaatgtatctgacccaccatggaactggtttttgcataacacttacttctaacccatgagaaatcctctgggagctgctgcctgctggggggattggagtagggatagcgtggatctgagttgcccactgcctggctcatagtgaccaatcctaggcttagagggcagaggttcagggtgcccaaggagcctgacgcaactgctctgagagccctggggtccaatcttaacctgttcctcagtcatactttctccttgtatagacacatatacatgtgcatacatctctggtctgcactggctcttttcataaataggcaaggaggtgataaagcaataggattagattttatacagaaggacttgcctcattattttgccataaacatacacacaaacgggcacgtatcaaactcacggaagtacaaactgtataacaggcaaactcatagacacctgcaaaaatagacacaactagtctgtcctcatcatgatacaaatacatagatgcagttacacacagaaacacacaaactagacctgcctcccttcctcctccccccacatacatgttctattctagttatccctccaaaacaaactgactcaagatttagtggcttaaaacaataattattttattatagctcatgatttaatgggtcaggaatctgggctcagctgggtgatttttctgttcctcatggcattgactgagatgactctgcggtatgtgactggtggatgggctggcctggaagggtcaggatggcttccctgacctgactgctgccttggtgggggtggctggaaggctcacctgggaccattgacaggattcagcacacaaagcctctcaggcttggcatctcatggtagtcagacctcttacctggtagctggcatcccccagaatggggagggtgctttaggcttcttatgacctagcctcagaagatgaagaatgtcacttgtcctgcatgttattggtcaagcaagtcacttaggttagctcagatttaaggggagggttatgagactttatctctcaacggaaggagtagcaaagaatttgaagccatctttaatctaatatatgcacacacatgcatctcatgtgaagcttaagccttccatattgaactcacttttgtggttgcatctgggcctgaaatagtggcaactgtgaggccccacccgggggaggcagagcggggtagcacatcaccaccctggattgtgatgtgtccagtgggatatgaggcttgggtagcagcccgcactggaggtcacttctaatgggcagagatttctattctgggacttaaattcaagtcccttccacatactaaatctagttatatctagggtctcttctatgtggagtgtccatgaagtctggaatcaaagattgtgctagatactcactagaatcacagaatgttctagcaggaagcaccatgcatccagcccctcattgtacactcagggacaatgaggccaagacaagggggtaaatgtctcacagtcacacagctgggatccccagccctgggtcctctatctccccgggatcccctgcagggctctgctccatggagtttcctctgccggggatcctgctatctgaatacctccagaggccacacacacttatgtgtcagatgtctgggtgaacactggacactggggactagctagtcatcactggtcaatggcgaggcctggaggagctcacctctcaaagtggccaggaggacataaccaggaacagaggagaacttccacatgttacttgtgggaacttccactggttaccggccacaggattgatcagacaaaagcccaaggcatgaagccccttgagggctacagagatcaataccaccttcatctttttcactgggaaaatttgatgaataaagccatctccagccccctcccataaatagtagcctgaaatgcagatggtgtggtgttgtggctttgaagtcagtcaaacttgggtcaaatcccagctcacccatcccccaacactttagctgggttgcctcggccaagtcctttgaccttctgagctcaactgtatattgaaaaaaaaatcacctttatttttccattcaacaagtgcttattgactaccgtgtgccagccactgctgtgaacacaatgatgagaccaacaggcactgttccttttgaaggatgctgtcatcagctgagtacgcaaacaaatgtaaatttgcaaactgcgctaagtgccatgaaggagctacaacagtgccctgtgagaaggtgcagtcaggatgtgagcaggttgaggaggccagggacagcccctatgaggaagggacacttggctgtggcctggggggtgaagagaggctatccagtggaagcgtgtctcggacagggagagtagcatgtgcaaaggctgtggggctggatgtagtaagctgaataggaggggttgaaatgctagtgtgactgggccagagagatcaaagggagcaagtgggaaatgagactgcaagtgtgggtgaaaactgttcaccaagttcaggagggtttagaaaattgcatgctttttttatatttacttctaaaagcagtgggaagttatataatggctttaatcatagaggtgactgatagggtttggctgtgttcctatccaaatttcatcttgaattgtaactcccacaattcccatgtgttgtgggaggaacccagtgggaggtaattgaattatgggggcaggtctttcctgcactgttcttgtgatagcgaatgaatctcgcaagatctgatggttttaaaaatgagagtttccctgcacaagctctctcttttcctgtcgccatccacttaagatgtgacttgctcctctttgccttccaacatgattgtgaggcctccccagccatgtggaactgttaaattcattaaacccttttcttttgtaaattgcccagtcttgggtatgtctttatcagcagtgtgaaaatggactaatatggtgacataaccagattgtgttacaaaaagaagacttcggctgcagcaaggcgagtgaactgcagggtggtacagggaggtgtgggcaagcccattaggaggcaggcagaatagtggtcccccaaagatgccccatcctcatccttggaacctgtgaataaattacattgggtggtaaaggaaagaatgagggttgcagttggaattaaggttactcatcactggccttaaaatagggagattatcctggattacctgggtgggcccaatgtcattagatgaacttagagagtggtcagaggtgcacacattagaagcattcaaactgcccttgctatctgggaagatggaggaagtactattaagctcattttataactgaagaaatggaacttctaagacataaggtgctcaagacctactcaagaccaagcattattaaatattataacaagggcttagatccaattcccttgagtatgaattctctttccattgccatgataatctggggaactcccaccaggttagagctgtgtgaccttgagcaagcacttaccctcttggagcgtggggtgaggaggtggtctatatctgggggctcattaactaaaagatgtttctaggtaatctgacaggtttttgagacccctaaaatgatgtgcaggtttctgggtgaatgtgcattttgtggagagaggattcatagcttttatcaaaatatcaaaagggccaaaaagagctcttcctcccagttctaaaactttatgactgtcattaaaaagtggaaatagctttggtgaaagagcatgggtactgactaaacgttacctttgtagcaattagccatacagcacctcttagagcctgttacacgtgaggcattatcacaggtgctgggagtatggcaggagagaaaggaaggtcctatattttagtaggaaaaacagaaaacaaagaataatgatctaacgtcagatactgataaagtgctaagaagaaaaagacagcagggtaaggagacgggggatgatcagatggaccaaggaagttccttccaggaagggtcactggaacagagaccagcatgaagtgagagaaggaggcttagggagaatctgccaggcagaggaacagctcatgcacagtctctgaggtggaagaagccaccatggatgatgaagaggtggcaggaggtgagtccggaaccgtggccagaccccctgaggccactgtagggccctggaatttactgagcagaccggggagcacgggaagttttgagctgaggagtggtgtgatctaacattccagaaggttcctgtggctgctgtgaggagcagagctgatgaggagcagaaacagactggctgtggagccattgctggagctgcgggagagagcagcgtggctgggactgggtggtggtgcacgcacggggagaagtgctcggggtcccccactggaggtggagctgcaggatttgcttgtgactggatgtggcttgggaggggagaaagggagtggctggggcctgtcccaaccaagcgctgctgcttctgtgagcaccacaggtgctcacctgcctgctgggatggaccttaccattgagccaggcatgattacttccttcaaatgactcttctgatgtgtttcaatgatgagtgagtggtctccgctaattatgactgggtaggccccttagagaagcctggctggacttcaggagtttcatgtgagaaaatcctggggaagtgaactgaactgggcttcactgagaaagatcctgagtgatgatcacagtttcacatcagatccgcatccgagaccagctgtgtcaggcagtggggcagcaaccttcacctagacccttggaggtcatctctcctaactaacaggacagagaaggaaactaggccctaagaggagcagtgatctgccttcagccacccagggaatgggcattacccttcactgttggccccccgacagctggaatccagcagcttgactctcatcaatttcactttttgcctactgcactgtggccttctctttggaatgctgagtcagcacagaggagggtgattatttgccaagggggggactctgagaaggccccatggagagctgggttttgagtcatggaaatgactccaaggacagatttgggtggagggtcaaccttcgactgggaggaagcaggggagcctagtcactgagatgggaaccctgtacatgtcccgggagtggagagtgaggcatgggagaggagctgaggcaagggggcaggcaggagtggatcatgcagggccatgcatgccagacctgggccttaactcctgggcaatggggagccatgaaaggttttcagtggggaatgatgtggtgtgatgtgctcaatggagcaggaggcacaggagatggagaccagctgtgttgcacttggccagttaggtacccttgctttggtataatccaggcatttgatacgtaagaaagctgacccaaagagggggaaaaacttgccaaagtcacccagcaagccagggttagagttagaacccagtttatccacctctcaatgggaggaagggaaggtgatgatgatgatgttggtgatgatgatgacaatgatgatgataacgaatatatattgagcacttgacattaagtatcttctttaatcctcacaagggccctatgacaaagctactactattattattgttattattgttccccttttatagaggggaaatggaggctcaggaatattaaatgaattgctcaagaccacacagatggtaagtggtgaagccagcattctaccctagatcattctacacagtttgactccaaaacccatgctggggaccacaagtggttatctcatcagatttgccagaactgtcccaggaggagtcctcttacataaaacatcatccctttcaccccatctcccccctactcagagcaaaccttcctttatcctcttcctttatctcaacagagggtaccaggctaccaaagaaagggggtatcattgttggaatcatggtgtaggagggtgtatgcatgtagatgcagaattttggagatgaaaacccttagaaaccactgagtgtaactcgagcctccgttagatggaaaaactgagacccagagaagggcggtaccttgtcgatgccttgcaacaagttagcgacaccagcgctaaagcctggattgcctgatccccaggccagggttctcctctcacattttggacagttcccacacattcctggaatcctccattggactgtgaatgggttttcccatgaaagcagactgtataaaccaaccataatgcttttaggtcccgagttatatgctgccattgtttcttcagtaatgctatagttttctctgcctctcttgtcctggaaaagctgactttggtagtaccgtttctatatgaaaatgttaccctgcttttacaaaaatctacaaatgaacgttggacaacccatttgtaaactgggagcagcccacgactttgagcctgataatctggaaacattactctctgaattctctcttttccttctgtgtttgtgagatttctgctgtttaaatgttgcaccatcaatgaaacagcagcaagagctttggagtcccacagacctgaatgtgaatttggacgtaggctccagatatgtgacttccagcaaatcatggcaagaacggtagcagtgagcccagctacatgaagattacaaggaactgtgacctgggtcttaatcttaatgaggctgtgatgggaattcaatttcagcttcattgagtatctgccgtgagctggtcactttcaagtacattttccatctgactctcatagcagaacttacatagcagagtgagattatctttctcctacccttataagggtagtaatccaatttctgaaggctccatcttcatcacctaatcagcccccaccttctgcaagaccacacctccaaataccatcaccttagggattacaacttcaatatatgcatttatggtggcaggggtgtgggtggggacacaaatatttaatccatagcgtcacataagtctatgttaaatgagaaagaaaaggaagaaagaaatcaagacaaacaatagagttgagaaggaggttaacacaagcatgtgtttcatggagtctgactcacaccgagaacaggaatgtggctctggcagccaatgcactgaacaaggacctgaacagtcatacagctcaaggttcaagcaaggtagaagcaaaccagctgctctgaagatgctcacctacttctgaccttgaatcttccacttcatgaccttcatccaggagtagccactgacatctgtatggtacgttactgttttcacagtattctgtcttttgattctcacatcagttctatgaggtaagtattttattgttagcctttctttagaaatgagaatattgaggcttagaaaggtaatttcttgccaaaggccacacagctcctagtagaagaactggaattcaaagccaggttcatttttggcttccaccgtgactgccaactgcttgatgccagaatccaaatggctgagcttcacactttatgttggaattttgaattacaacaaatagttgtgggcagaatgagcctattttctacttagctgtgaaagaaattattgttgaaatatactgggtcaccatttttggtgttcttgtgtttatatttaatctctgaattcaaaccagactcttgggggtcagagatattgctcctctggcagtccaagaatatatcttgtatttgatttaaaacttcattttgaatcagggccaaatccaaacactgtgaatttaaactgctggcagccttcctagcctacctcgtgagtgcaaaatcaatccaactattgtacacagagaattctggtgcccgtgtgactgtgttggtggcccctgaagaatttgggttggatggtccagaatatctgtacccaagttgcatgactttttgcagcatgctgaaatattccacaggagctgaaatagaagcagcaactggattccaagaagtgtttcaaatgcattgctcagttgaaatgaggacttcattagctgccatattaagcaacgtatagatgaagaaatcaatggccttacccctgctaccccagcaaggatccagattggatacaatcctataacacacatctgccttctttccctggttctgtcttaaaggaaaatctatcctttttattttgggtgtggttccaagagactagaatattcctccctaaattcatccctcttgctttcctaatttagtgaatgatataatcatctacctagtcacccagactagaaacttcaggcatccttgaaaattccctgtacttcaaccccccaatccaagttgcatatcatttcctggtgattccatcatgtggttgtgttcagagctcatcttcctctttgtcccactgtcatcaccttggtccatatcccagcgatcctttgctagaataaccttcaaattcacttctctgcctcgaatccatcctccatgcggaggtcagtgtggtccttgtaagacacagatttgatcatccctctcctcctctgtaatccccagtggtgcacagtgactgctctcacactgctctgagagcctcaggttttctgtagccaagactccagtccccttccccatttgaccatagccatttcccttttttctaattacataatgtgctccagcaagagttgttgtttgaggagggcattcttaaaaaaatgaaactggccggcttagagcacaaggccagaggtcctcctgggagcacgcgaggccttcgccatgccggcctcactcacccctgcctccttgccccctgatccccccggcatccccttatgcccactgcatgtgctcaactactctggaatcatgaggggcaccgtgctgttcccaacatatgtgcgatgactttgttattttgaatatgctctctgctctgcctggagcggcctttcttgtcctctcctctcccagagttcccactcaccctgcagaggcagttcaactgtcccctcctgcagaaggcacgaaccttccctacattccccacaggcagatgcttggctgcctcctctgtgctctctctggaccctgggcatatcttgatggtagccctggccacagagatctttgttacttgtcttcctgccctccactagcttatgagtgacttacggacaagatttgcatctcatttgttgctgtgttcccagtacctagcgaagtacatgacccctagagctattctatgtcatgatgtaaagcaacaccattaactaacagtcagtcaacaaatatgtgctggaaaagctaagtgggtcagatgaatatgaggtggggtgcagggccaaggaggaacaggacaggggaagaggtttaggggcttctggggctgtttattctgggctgctggcagttgaactcagagcacacatgtttttgagtataattttagtagaattttaggcctaggacaatacatcccttaggaaggctgggcctactccctgtgccctttgtgtagttctaactgggacacttgtgagaaaggactactgcatatgtcctacctgctaggataacgccatgccaacagtcctaatagctagtacctgaattgggctttgcccttttgcctaaatgagctcacttaatgctcacaataactcctgtcacttggcagggcaggggttattgttacccacattttacaggtaagaaaacaagccctgtggctaagaaacagcagaggcagcacttgagtcatgtcttctgccttccaatcccatcattttctcatgcagcctgaccttcttatgatccatgtgctttggggaagacatgaagatggagaaagagtgaaagagtcagagagacagggagtttccaacctcataacgcaccctatgtaattgacacatcatagttgaatgtgctcaaagaaaagacaccacattctttgtgtttgtttgagatggattttcactcttttgctcaggctggagtgaagtggcactatctcggctcactgcaacctccgcccccagggttcaagtgattctcctgcctcagcctcctgaatagctgggattatagctgcccagcaccatgccaagctaatttttgtatttttagtagagacagggttttgccatgttggccaggctgatctcaaactcctgacctcaggtgatctgcctgctttggccttccaaagtgctgggattacaggcatgagccactgtgcccggtcacacattcttcttcttaatttagtttttttttaattggcatatagcctacataccaccgaattcaccatgttcaaaatgtagagttcagtgagtttttagtatattggcaaagttatgcaaccattaccaccacctaattccagaacatttctattaattaatttctaatgtttttgtttttcagattccaataatgagagaccctgggtggattcgaaatgtatggtcttcaaacattaacgtgagtgccgctgtgatagaatgtcgttgttatgcttttacattttaagattagagaaaatactccatgtccagctgtggtttgtcgccatggctatctgcagtctccaaggcaggcctattcctttccgctgatgctttcagagattgcccgcagcacttgctggatgcttgattagctccccatggagctgtgaacattttggctggtttctaatctcttcttcctgagatgaatcctcctccaggcagagaaaggagtttgtcacctccctgattaaaaagccttcaatggctccccagtgccaagaggaagaggtctgcattcacactcatgtcattggttgcctttactggacgatccttaccgcaaatgcagttgcacatgactaatgagagcccttgcctcacgccctgagcccctcaaggcccttccccagattctgcctcttcctcccaccgcagcctctttgccttgcacctggttcccaggctttggtgcagccccttcagcatctctgggattgtttttcatgctttgctctctgtctgcccccgaggctgtctttttggctcttcctagaccccatgttccacagcccaaaggccatcactaccctcactcctcaaactctctgagccactgttgtttgggtggggggatattttgtttacaccctccctcgccccactcccagaggtggtcccaaactctgtctcccgttcctttctcctcgggccttcaccctgccctggagctatagctgaagcttcaggggcatcatgtaatttgctacaggcccacagatcttacccctgagatgcttccactgtggggaagaggctggaggcagcgtgtgtggatagggaggttccagaggggctgtggaatgatccagggtagaagtgatgacgctggaatgcttagtgtccctactgtggcctggtccaagccttgtggctacggaacaaaagtaacacttagtctccaccctcgaggagcccacagttagaaagggacactgaaacagagtgtggactaaggatttgcagaggacacctgaggctcagcgcggccgcaggcagagtgagaggttcgtcgttgagacgaatccagaggcgtcagtgacatggatgaagaaggctgcaaggaaggcctggcctgggcactctgtgaggagcagaagttttatttccaaggggattggcagggactggggccaaatggaggccaggaatcctgaggagagagcagttagtggcagttatgcctggagggagagaagctccgctctgtgagaaggtgcaggaaattgaagtaagtgacccccttcacctgtgggtgggagcgcaggccacatagtcatggaggcggcctcgggcagcttcccgtggttcagtcccattctccagactgtggggcaggagcccatggctaccatgtttccaccccagcttctggccccacgtgcaggacacacgagaggcaggtaaggaaaggcaatccgctggcctccatccccaccctgcacagagctgggctcccagcaatacagggagctcaggacgggaggcgccaagcaggaggctcctgcttcaaaggtgaaattacagaaagcgtccgccatccatggtaggggtgttggatcaggagtgcaaaatctgggccatggctctgccacttacagcatgtgtgacattgagcaagttacctgacttctctgagttgcattccacatgcgtacagcaggatttcagtgaatcctgagcagaaagtgcttgctgtccaccatgggcctcatgggagaggagaagtagggcttgtatcagcttgtgtgggtggggggttcagaagcaatttcagaaaaatgcttccaagagaaggtgagtgttctgcagggtattgaaagagccataccagttggccaagcacagaggtaagaaacagcacagtgtctttgagatttgggggatgtgattggaagaggggatgaaaatggaggaggaggatgggtaccgatgaccaggaggcctcgtctgcttttctgaggaccttgaactttatcctacaggtaatggtatacagggggccggggcaggtggattgaaaggccccaagcaggcaatgtcccctccagatctgcagtcctgtgagagtacagctataggggtggacctggaggcaggggggcagcttggggtccactgttagcctggctgagtgtgaactgctcatggaacttcccaaggcaggtgaccagctggcagttggatgcatggtctggagccaagggacaaggtctgggctggaaacaccgaactgcagtccacagtggacggtgcggatcaggtgtgcaaggtggacagactcacgctggagggcgcatggcatggggaggtggctggggcatcaggcaggcttccaacccacacctctccttctatcccggcattgatcattgttgtgtcccgctgtccgcagaaggtaggttcctaaattccaggaatgtttagtaatgagaaaaccaaaaatgaggaggaagggcaataggggcgaaagtaagactcaaagtctctctctcctcctgctctccctctccctctcgttcactctctctctcccagtctcctctctctctctgtccctctccctgacactgtccccctctctccctccttcctagtgactgtgccactgtactaggcactggggacacagtgatgagtgtgtcatggttagtcttttccttctggagttcaccaagcaggggagggggtagtgggatcataatgatggtgccgtgtgtcaggtgctatgacagggttgcctgtggactcgtgagtgcagagaagccagcgattaattctccatggactggagacatgtttgagggaaagtttttctaagaggtcaagctcttggtttgaagaatctagctgtgaaatacagaaactcaacgaaatacacactcaccaacccacctcccccggctctatccccaaacaagattcaagacagcaaaagacctggaatgctgggacaaattgctacaccagaagcaacaccattcacgttgtgcctccctcttggctgatgtgtactttgattgcgacatttctaataagaacaacaattcccagaattctagcttatcctggcccagttactggaaaccatattttgcttatttcttttatttcttgtctttaggttgggaaaggactggacctaaattttagttttcttggagggagcatgttttgtcgggggaggaagtgaaactttgtctagatttacatttatttttgaaacatgtgatcaaagcgatttatgtggctggttctatagaatcaactgggaaatactggctcacaatgaaggccgcagtctcctgttcctacccagttaattgatgcgtctttgcacattgccctgtggattcacacctgatagaggagggtctggctgattctacagagcatcaaatgccaatgatcttctttctcataatctagcatttatgtgtaatctcatcatattttagtttgttctatgttcagatactgccttacttgtaaagagttttcttggcggggagagatatggggggtgtttttcctggaggttatatttgcctctcttttttattgttagaagaaataccactacctgcccatccccccaccctccaaacacagaatgtccttaaactttgacattagcctatcacgtggaaatcatcgcattctttatttttaagcctgtaaccttgttaccattggaatctattccttctatttggacgaccatatttttcatatggcttttagaatttttaaaaaaaattatttagcaaatcttatataccacaaatcaggtgacaggtttttttttttctaagagcattagaaataataactcatttattcctcacaacggccttctaagttggtcccattatgatttctgtttgagagctgacaaaccaagcacagagaggctgagtcatttgctcaaggtcacacagctagaaagtggcagggttagaattcaaacccacagatgtccagagaccttgttcttaagcactattctacctctacaagaagttgctctctttcagtagtttctagttctttccattgcttccttgcttttagtgcctttatcacactctctagtttccccagactgacagctccctgtgtaggtaaccctgttttcccaggacctctctccaggagatctctctcttcctgcttgctcctaagtcctcccacagagctgtcctcttgggaggtcctcactggagccactgtgaccggattgctattttcttctttcttagtttcctcttttacaataagcaaaagctggagtacatttccaggtaacctctcaggaaaagggggtcaggatatatatatatatttgagatggagtcttgctctgtcgcccaggctggagtgcagtggagcgatctcagctcactgcagacttcatctcctgagttcaagtgattcacctgccttagcctcccgagtagctgggattacaggtgcccactaccatgcccagctaattttttttgtatttttggtagagacagggtttcaccatgttggtcaggctggtctcaaactcctgacctcaagtgatctgcctgcctctgcctcccaaagtactgggattacaggtgtgtggagatatactttgaatgcttgcatgtcttaatctctaatttggctttacatttgagttgggttgaatttagaatttgaggttgatgttcagttctcacagaattttgtacacattgttccattaccttctagcagcaaatgttccttctacgcctgtctggctttggtttctttgtaggtgagcttttatcttattttttcctactggaagcttttaggatcttctgctaactctttgtgttctgaaacttcacactgatgtgccttgaggtagccgtttttcattcatctgctcagaacttagtctcttgggggacaattcccttctcctctaatagatatcagctgatgagatattccgagagatgaaaggaaaatggaaaaacaagcaaagggtggtggctaaggacgcaaggagtggttctctatctcttttatcttctattgcccgacttttttggtctgtgatttggcagattttataaatttcactttctattgttattattttcataatccaaattgtttacttttcaaacttctttttttgttctctaattatttcttctttacagcattattctgtttttgttttatgaatgaaatagcaacccaaatctgagcttctgatctgggaattttttttcctagtaatttctcttctattcccttcattatttttatttattctggaattgtttcccctgtttgttatttttcctctttcacattgcagggtttcctcaaatgcctggcactttgtggttgtttttatttagcatgaacaggataaaaagcttgcctggaagatccaactggtagagttcattctggaataaaaagtccaggagctggctgttatctggggctcctgaggccagtgcctgcttgagttctgtaggcagatgggcccctccctcactgaagccccctttgcaggaagtccagggtatagcttgctctatgttattttagtcagactttccctttgctttcactttccaaatttgatgaagtatcttctccattgaagatgcccctcctgttctttacattgctgtgagttttaaattctgaagtttccttgaaatttaatgagttatctggagtaaacggaaaataaatgcatgtttgtctcttgctccgtctggcatctgccctggggttttcttccttgcctagcattgttaatggagctcttacgcaggtgccccttaacagtcactgagctcttatctagaaatgcactgtggtggctgttataaccaattgcttctttttttttttttttttttaaagcatgaatcattgtggcatggattagcgacaggcactagcacaatcagatacaacaataatgcatttaattggaatcgtatacagaatggtcattttttgttcagtgaattctgagttgtgaatagaaacgttgtatgaatggtgcattttggtgtatatttccaatcctcccttttatcattcccttctcccaccccagtgggcagcttgctccgacttgcttgtcctcctttctcttgctggagacattatatatttactagctcttgtattcctagactacagaagtctctcttaattgtttacccctactgtgccttgcatcctaaaatggcccacaataaaggcagtgatacctttaacaccagtatctgcctagttcatttatttttatgatgatgagtatattttaattatagtttattatttttattatgatgaatatctttttgcaaccagacatgacccatgatatggtatttaagcattcatttaaaaatttttgttgagcacctattaagggccaggcactgcactagatacttaagcagaaaaggtctcttccctcctatagcatctgtctgctgggaagtaattctacaataattgtatgcacaaatggaatgctttaatatgtaactactttgaataaaagatatgtggaacagccagggtgtctaacagggagaactgacatagcgggggaggttgatgatgctcgaactaaggttgaagaatgagtggctgttgaccaggtgaagaagggggaagatccatgttgaggctgagcttgcacaaagcccctgtggtagaagggaacagagcaagcatgaagaaatggaagcaatgcagtgcggcttaagcttagacctggggagaaatggtggagccaggtcagcagtggctgccgacatgtggtcagatgttggatgctggagctggagcagtgtgtgtgtctggcagagtgatgtgtgtctttctgaagctctctggctgatccagctgtctcccgaggatgctgcagctgagttgagcaaagaccaagcagatgtacggtgtcaggttaggcatatgaagcaaggtgcgagagaagagaattcagactgagtaatgttaggacagggcgagtccttgtctgcccacgccctgctctctgactgcctccctctcttccatttgagattccagaaactcccaactgattccttatctagactgtgctgtactctgcttagaactccctccaattgggttagctgtgcctgaatcttcacttccacgtccccaggggagggagaggagaaaatattgggcgggatgttacctattttaaaatcaggtgaattcgcattaattccttcttatgaaatgatatcaatatcccttgagatgaatagagatgcgctggggtatcttggacctgagattgacagttactgtactgcatgcgtgtgtgtgtgtgtgtgtgtgtgtgtgtgtgtgtgtgtgtgtgtgtcaggggtgaggatgcaagatgatctgtgcctgtgaagtcacatcatagagatgttaattataggccatggctaaaatgtgtcctggtggtcctctgtttcccattgtgtcactgtccagtgtaaggaccgagttccccaggtgacttgtgcagggtctcatagtaagggacagagaactaaccagaacccaggtccccagttcctcacaccctgtccagcacaccccagactccagaaagacttgtgggatttttttttaactgggtctctatcctcactgttctaggaggaaaaaacattgagtttggttgaggcccaaggcaaatttaatgtggagattggggacagacacttttcctctggtgacttgggtcacctcatggacagagcctgatgtctggcccatgggcaaatctacaactcagaactttcagacagagtcctcctgtcccttctcttctcatgggacagaagccctggtcacgtagaagggtgacacaaacctccaaatgtggagaggattctctaagcagggtggggaggggagaggagaggagctaatgccagctcagcacagagaagttcaatggcagctctcagaagccagacttgcccatctctgcaacaaccatcattcatctgtggttgctcagggtgggagacaggaagcttaacacagaattatccaattggttttgcaagagatacagtagttcagtttggaaggcagagaaaaagaaggagggagctatttcattgatttatggctggatggagcattgaaggaatctagctccatttgctaagtcatgttcaagacccctccacagcccctttccaattgagggtgcagctgggggcttccagatcacctctacgcaggcctgacttactcataggtccttttcatggtgatcccaaatccacccagctccatccttcctagcctttgagattacagacaaatgtaattcttcccctgaatgccagcccttagacactaggcctccacatctccatctcccattcctcacactgggtttccttttgcagattaagcagcttcagatatcacacttagaccatggtttggtcaccccttttgtcctgggtcattctcttccaaacaggagatccatcattgtcacggctctgcagtgtaatggccagtagggactgcagtttgtcaagggtggtatgacctgcagagaagcccaggggaaatgaattcctttgtttcaggctaataggtgtgtatttgtgcagcccaagatcacagggttgggaaaatgcaaagctacatgatcttactctactaaggctggcgggagtgttacataagccagaatcttgtagcccattgaacatgcaggcttcagtaacacccctttcagtctcagtagaatactgtacacttttgaggatgagaatcatgatttcagaagcaagtggatgttttttagctcccaaattttaataaggaagatctgaaaatactacagaagagcctagcacttagaacaaatgattggtgaatattttaggaacaatcacactctcatataggacaactgaatgtgctagattagcacatgacttaaaaggtgctgttgcataataaaaagtcaacaaagcatgtgcaaatcccacgctgttactagaacctactaccctgcctttgaacattagagcatactttgtaggactctgcagtgaacacacatctatccaaggtaccatgaactagagacaaaagaaaaaaaatctcttccctgtaagaatttaccttccaaatgtggcttttccatcaaagttcaaaagcactgttcaaactggggagaggcaaggcaggttttgtatgcctggaagatcaagagagttggcttgactctgtgttttcccaaagagtgagatgacccatggttcatgaactgatatttctaagttgcaccttctttcctgaatgtagagatttggtactaggcatagtgattgtgcctaagtcttgctaatgagaagaaaacccccttgaatcctaagcatctatgtaaagactgggaaggcgggctgggtgcagtggctcatgcctgtaatcccagcacttttggaggctgagacgggcagatcacgaggtcaggagatcgagatcatcctggctaacatggtgaaaccccatctctattaaaaatacaaaaaattacctgggcatggtggctggcgcctgttgtcccagctactcggcaggctgaggcaggagaatggcgtgaacccgggagacggagcttgcagtgagctgagatctcgccactgcactccagcctgggcaacagagcgagactccctctgaaaaaaaaagagactgggaaggaggagcacagggatgttccttgctgttccgtgaaaagtttgggctcccagggtcacacctgagcagacttctgatgcttaagtggcagttccatcatattttaaaggattccattctgttgaataactttccattttagcatgttaaaaacttctaattttagttgattggacaataattcaaaaattgtatactgtaattattcttcattttatctctctgatttaggcatcttgatgccttttttattcaacaacatttattacaaaaatctcaatatcaaacttagccgagataccatcaaatttccatattccctccctcaatgtctttctcagttttttggagtgcagcattctgaattaaaaatctcttctagttagcttgctatgaattcagaaatcagtggagaaatttgatttcgtgaaagaacctgcccctgctgtaatccaagccttctatcggcctctggtgtggaccaggctcaagtctgaatccagggctggtctcctgcgtgccccctcctgaaacctggctcactcctcttcatctctttctctcctcctctgaacaccaccaaatgctgatgtcatagtccccgtggggggcatcagaatcctgccgcccaacaatggcctttcccaggagagcccatgcgcagggcatggatgaaagcaagctggagagggagagaggatgggaggcgaggaggcagcctgagggaaggaacaggagggaagagagatgaagggcaagaccggggccagccatgcctgtcctaacagcagccacccagcagtggcccagcctgctgagaactagaaaatcagaagaaaaaggagaatccaccaggagacccaggttcgcatgagcaggggcctttatctgaagttaatggaagctgagccaggtcctgacaatgtgccttctgatggggagatgagactttcctctgaaagctaaggtaaagggcaggcagggagggtggggaatcacgatgcttccagagcttcccggtgacacaggtcaatgtgtcccccatcgggcttctcaggccctggcttgctgaagggggcagtgactggaatttggggagactggagctgtgcaacaagacagggagttttgattctgtttgctggttcgctctgggcttttagacaggtcttgccagcttttcagtgtaactggatgctttctcaaggaattcttgtaagaatgataaactatggttcacatttataaaattctaatgtagacaataattttccccccaatattttattaacatggggaatgcgtggccgggcgcggtggctcacacctgtaacccagcacttagggaggccgaggcgggcggatcacaaggtcaggagatcgagaccatcccggctaaaacagtgaaatcccatctctactaaaaatacaaaacattagccgggcgtgttggcgggcgcctgtagtcccagctacttgggaggctgaggcaggagaatggcgtgaacccaggaggcagagcctgcattgagctgagattgtgccactgcactccagcctgggggacagagcgagactccgtctcaaaaacaaaaacaaaaacaaaaacaaacaaacaaacatgtggaatgctaaggaattgccattagatgcatgggccagcctgtgatgttgagagtattttcagggacagggaactccccaagttggatcctgacaggaatcctcagagcctaattccttttagagggatgagaacaataggtaccggaacttcaattcctaaaccaggactcagagagagcccacagcatggttggaagtaggcgacatctgtctctgggccccctaaccctttcctgacttgatcctctttccctttccatgggaaagaggggtccctagaattttatgtaaccctgggaaccattaatcatgcaaaaacaatcagcaaacacacatttataggaagcgcaattccattgggattttaaagtcatggatttttttgtttgttctgttttgtttctgagttgggaaaaggtggctgtcagagactttttgaaacagccagccagtgtggtctgacactctgaggctcctggcagggaaacacgtgggcacaatcccggaatcacttttttctccctggatttctggcccttcttttatggatgaatgtggaaacaaatgaagattcagctttcctaaatccaagaaggacatttaagagataaagctacaaggactctcatctcaaagggcgggatcaggagttaacgcacggcagagaggctactgtggccccaccttgagcctgtgtggtgactggcagcgttattgctggagtgatccattctcatagactcaagatgatggaaatgcactgtcccttcatcagttctccatggcaatcaattcacagccatagcttgacctgatcaccaagcatctggaccatcatagaagccctttctacctcagctgctgcccggcatatgaaatgtccgccatagccagattcatttaataaaacagaggtttcataatgttttacttcctgcttagaagcttttaatggctctcccggaccttcaggacaaaacgctaactccttaggctgccatctgaggccatgacgaatcggtctccatctgtcttcccatattaacacctcaacaaacccatagggctgtgtgataacctgcaagtgaatcctaaacacgttttgaactttcccattacctaaggtttgctaaacgtgttgctccactgttactcccagccacgctctcccccgccccccatctcttctctgctcatctgtcctggttgtcgtccaaagctcctccaggtctggatcagatcccatctgtttaagagcagcttcagcctctcttcccaccccagcaccctctcagccctcctccccctcccaaactcctcgagcctctgggactttagcaatcatgtgatagtaggcatatgtggcaatgttgagccagttatttttttaaaataagccatagaattgattcaaatgttgccagtttttctactagtgtaggttttctggtccaagatctgatctacgatcctcaatgtagtgagttgtcatgcctctgcagtctcctccaagctgtgacagttccctattctctcctagtctttcatgatcttgacacttttgaagcgtgcttgtcagtcatcttgttagagggtcccccaattcaggtttgtataatgttttcacgattatgcattattgggatgaaggccacaaaggaacgtgcccttttcagtgcctgttgggcacatggtgcagacatgccatgctggagttgtcaaccctgaacacttgattaaaggggtgtctcccaggttttctactgtaatttcccttttaatcgctagaaatgtttgagactatgttaatatcccctcttttctttaccttcgtccattcgccttagcttcccttagtggatcctgctgcagtagtgattaatggggcattctaatggtgattttctgtttccctctttctttctacatgtactaactggaattcttctttaaggaaaagtagcgtcttcaccattcattgttttattcagttattacttacatcagtatggatttatatatcttaaaatttatttcggttctaatctaatttcctgtgttctttcaacatctttgctcgcttgtttcttttctttactttttggcacctccttaccataagatcctccaggctcatgtggcattttgtctactctggccctggaatcagtcagttctccagtgaccctttttattggaaaaccaagacgtggggtgcttgtgtgctcactgctagtggggtgtcactgtttctagtccctctcagtggaaaagagaaaatatatttattataggaaccatgaatacacacatgcacctctactttatccatacatccgtcttatctattatctttctatattttaaagtccacgagtttatatctgactccaattcagaccacaaggtacattcagtttcccactttccttatttgcaacttctttctccaacagtgagaaactctgcttctattatctgaaattgatttgcttattttttcaatcctagtacccaaataaagtacagttagccctccatatccaccagttccacatccatggattcaaccaaccgcaggtcgacaaatacagcattcgtgagatgcagaatctgcagatgcggagggctgactttttgtatccagggattttgtgggtttgctgtacagtttttttgtcttctgcattatggcacccagttgaaacactttttgccagagtcacttaggccagctcctttctactctgctctcctttgtgtggttatgagattcatgtgtgataccgagagattcacttgtcagtctgcatgccatctttactaccacatcccatttggtttttaacatttatataacagtaatattcttcgtagtgtagcattctgtgagtttggaccaatgcatagagtcatgtatccacatcacagttccgtgctaatatttaaggtaggtttcctgtagacattatacagctgggtctcgcttttttatccaatctgacaatctctgtcttttaactggtatattcattgtgatttttgacatagctggtttaaatcctctatcttactacttgttttattaaaaaaaatttttagacagagtctcattctgtcatccaggctagaatgcactggcatgatcttgacccactgtaacctccccctccccaggttccaagcaaccctcccacctcagcctcccaagtagctgggaccacagatgcatgccaccccacccagctaagtttttgtatttttggtagagatggggtttcaccatgttgcccaggctggtcttgaactcctgagctcaagccgtctgcctcccaaagtgctgggatcacaggtatgagccattgcacctggcctagctgttttatatttgtgctatctgttctttgttttttttctctttttttcccttcacttgggttaactaaatacttttataattctattttatctccctattgatttattctatatatctcttaaatactttttagtgattgctcaaatacctctaattcatatctttaattataatttatcttaaaatatgtataagttccttgtagattctggatattagaccttcatgagatgagtagcttgcaaaaattttctcccattctgtaggttgcccgttcactctgatgccagtttcttttgctgtgcagaagctctttagtttgattagatcccatttgtcaattttggcttttgttgcaattgcttttggtgttttagtcatgaagtctttgcctatgcctatgtccagatcgaacaatgagaacacatgaacacggggaggggaacatcatacaccagggcctgtcggggaacgggggcaagaggagggagagcattaggacaaatacttaatgcatgtggggcttaaaacctagatgatgggttgataggtgcagcaaaccaccatggcacatgtatacctatgtaacaaacctgcacgttctgcacatgtatcccagaacttaaagtaaaattttaaagaagtggaaaaaagtataatttaccttaaaataatacttataacactttatgtaaagggggaagaccttacaatcatatattcccaagtctttcctccaatcctgtctgcttttactttcacatatgcagttaacatacagagcattgctactgtttttgctttagacctgggattggtaaacaatgacacatgggccatatctgttctggcacttgtgttgtaaatcaagtcttattggagcaaagttatgcccatttggttatatcttgtccacagctgcttttgcactataattaatggcagagtagagtaggtgcaacagagaccatgtgacctgcaaagtctacaatatttgcagtctggctctcttatgtggtttctgatgagaagtctgttgtaattctaaccttgttcctctatataatttgccttttctctggctgccttcaagatgttctctttgcctttattattttaatttcaaatataaaattttgttttcatttaaattcattttaattttattttaatttcaaatagaaaatgcctctgtgtgtgtgcatgtgtgagtgtgtgctgatatttaacctacttggttgtttggtattctctgggcttcttggacctatagcttggtgtctgtaattaattttagaaaattctagtctattatttatttttaatttatttaggctattattttaggctatttaataagggtattaattattatttattccaccctactctttctctctttctcttctcctccttagattccatttcacgtatgttgacatcgacccacagctcttagatgccccattcctgtttggttcctttttttgttctcactctgttttcctctgtgtttcagtttgggtaatttctgttacctacctccagcttcagtgattctttcatccctgcactgagtttcctgaggagcccgctgaggccgttgctcacctttgttaggacagttttgtttctgacattttgacttggtgcttccagttctctccatgtctcctgtgaaggttttcatctgaccccatctactgcacacctcatctcatctgttacattgtataccttatgcaattagagacatcaacgtattaagcataattttcttttaaaaagtccatgtctgatagttccagcatctgtgtcatagctgagactagttagtattgctgtctcttggaagtgtgttctttttgcctttttcttcactttataattttctcttgaaagctggacatcttgtgtagaactgtagaaatgaacatcattttttcttccctctggaaatggtgctgtttctgctttttctacgggtaggcttttgctgttgggggcttgagttactctaggtagaagttgggctaggtttgaagttcattgttgctattgctgccctccatgcagcacagccgtcacttcctgcggaagtacctcatattttagggtgcagtttggtttgtcagaggaatacctgcttgacatcagctttggacctaccctctgcactacaccttggagagtgtctttctgcatgtcactctcctgttctgctgctcttgttctagtcagctcgacgatgtgaggtggggaggggcagaaattctctgctgtgctgattaagacgcagcggtaggcaggcaccctgcccttggttttcagatggctgacttcctcagtgtttttgctcctgcagtaggtttagtaacaaacacaatttaaaaaaattattttaagttccgggatacatgtgcagaatgtgcaggttttttacataggtatacatgtgctgtggtggtttgctgtacctatcaacccgttatctaggtttaagccctgcatgcgttaagtatttgtcctaatgctctccctccccttgtcccccaccccctgactggccccggtgtgtgttgttcccctccctgtgtccatgtgttctcattgttcaactcccacttatgagtgagaacatgcagtttgttttctgttcccgtgttagtttgctgagaatgatggcttccagcttcatccatgtccctgcaaaggacatgagctcattctttttcatggctgcatagtattccatggtgtatatgtgccactttttctttatccagtctatcattgatgggcatttgagttggttccaagtctttgctattgtaaatagtgctgcaataaacatacatgtgcatgtgtctttatagtagaaggatttataatcctttgggtatatacccaggaatgagattgttgggtcaaatggtatttctggttgtagatccttggggaatcactacacgctctttcacaatggttgaactagtttaccaccaacagtgtaaaagcattcctatttctccacagcctcgccagcatctattgtttcctgactttttaataattgcctttccaactggcctgagatggtatctcattgtggttttgatttgcatttctgtagtgaccagtgatgatgagtttttttttttcatatgtttgttggctgcatacatgtcttttgagaagtgtttagtcatatcctttgcccagtttttgatggggttgtatggtttttttcttgcttgtaaatttgtttaagttccttatagatattggatattagacctttgtcagatgggtagattgcaaaaattttctcccattctgtaggttgcctgttcactctgatgttagtttcttttgctgtgcagaagctctttagtttaattagattccatttgtcaattctggcttttgttgcaattgacaagcacaatttttaagtaatgatgagtttatgtaatatcttgcaatatgtgcaacaactttgatgtggtgtgaacatttctgttattttgttgttgttggaggtggtggtcgtgtgtatcattaatactattgccatttgttacctatatttataacagaaagaaatactgcatttcagttagaagttagtgaaattaagatgtaattttcccacatccaagttcatgcttctgctttgtatctgtggaccctttggacttctggttcagagctatctactctagattataacatccttgaagtcagggactgacagacagacctgggctttattcccagctgtctttgttttctgtgtgacatgtgtttccgcatcaggttgtagaaataataatagtacttacctaatgaagttgctgtaggatcaaaatggttagataatgtctgcaaagggtttggaaatacctattccaaagcagtattcaattaataaatgtaagctccttttgtaaattgctgtcaggccaaaggaccacctgataaatggcaatgtcataataaaatcctgctggttggtgtccaagatgcatgtgtcttgtgccacattacactgtggtgaaatatgccttattaccgatacctaaatagatactccctagtttaaaaagaacaaaagagctggtcattgttcttgtgtagaacttgaatttcctgatggactgttccaaaaacaataaccagaattacaagtgtccatttctctctctctctttctctctctctctctctctgtgtgtgtgtgtgtgtgtgtgtttgtatgggggccaaaccaaaacttgtgaggtccctccgaccaatatttccacatatatttggaaggaaagtcatgggggaaaagactggatggggggaattgctggggtcaatacctggctcttctaccttaacaattccattcccactccccagaaatgtttattctccactcagaaaaatgcaccccatgacctgtcggtttagcaaccacttgatctaatttgaatatgtgtcctatggtttctactcccttccccctgcagctgatccaagtattccttttgaaactagatagggtgttatttccaagcaggattatgggaaatagattttctatcttgctatgttcccaggaatgttttaacacctcatatacattggagcctgggcagatgaatctggttttagtgtggcaatatgaaagtgtatggacacaaagacacacacacacccctaacactagttggcctacacaatcatgcattagtattgtcctatacacacataataattgtccagttgcatgactctttactgtgttttctttctctctctctctctcttttttttttttttgacaaagtcttggttttgcccaggctggagtgcagtggcgtgatctcagctcactgcaacctccacctcctgggttcaagcaattctcctgccttagcctctcaagtagctgggattacaggtgtgcacaacgacgcctggataatttttgtatttttagtagagacagggttttgccatgttgcccaggctggtcttgaactcctggcttcaagcaatcttcccgcctcggcctcccaaagtgctgggattacaggcgtgagccactgcacccagctactgtgctttctttccaaggactggaggcccacagccttttggcactccccgcagagcagcacattgtgagcacccaagttccattgtacaaaaagcaacaatgaaaggaatccaagagatctccttgacacaatcaaactgaaattcaatgcgattaaatgtcttgacaaagtcacacagctagtaaggggcagggctgggacacaaagccaacctttctgatgtcaaatcctatgttctttctcccgtaccacacttgatgattctacacaggaaagagtattgtgcatttggccatgaatcaaaacagaccagtttgtattaaattagagaccttcattcacattgcaatgtgacattttgaagctactgttagagcatgagggactctaaccaatgaccaacttttcttctgtcctcactcatgccctttgggaacacataggatgagggatggataatagtaataataacgagcatgagggactctaaccaatgaccaacttttcttctgtcctcactcacgccctttgagaacacataggatgagggatggatgatagtaataataacgtgacagagagaaactcacccttttttatagccaagcaaatacaacccattgtttacatgttctgaagataaaccataactagtcctcaagtaagagcacttgacggcaccctttatccttctcagttcatcttgaattcacctggtaatctgcattagctaattgcttttacccaagacccaagagggaaaaaaatccatctggacaggagatagttttgcatcttggagcaagtctcctgccagataggctctcttttaccttctcatggaaggtagaagatggggtgctgtcttccctgatgtttacatttcaaagaggcggcctccagatctcttaggaaacactcctgagttttacaggtggccacaggcttatttagcttttcaaaagatttacaacatctcaaagggacagagaaagaatttacagtgacatgtatactatagtaaatgctcttagagaagcggggggaaggcagtctctttcccttattgcatgagagagaatgcaaaaaaattttttgatttgtatttacccttgcgttagaaaggaacagttgagctacagctgcacagctcctttgacgagacagaaggaacaagggatgcagagaccagaaggttattcagaaagtgttcctggctgggcgcggtggctcatgcttgtaatcccagcactttgggaggccgaggcgggcagattacctgaggtcaggagttcgagaccaacctggccaacacggtgaaaccccgtctctactaaaaatacaaaaattagccgggcatggtggcacacgactgtaatcccagctacttgggaggctgaggcaggagaattgcttgagcctgggaggcagaggttgcagtgagtcgagattgtgccactgcactccagcccggctgacagagtaagactctgtctcaaaaaaaaaaaaaaagaaagtgttcccatggtacccttggagggggataatgttcctcttacatctttgatgctccttttaggtgtatgtggttttgttaagtattatattaatgttatgctttaggttaaaggaaaattcaattttgctttcctaagtacacaggaacatgtatttgaatctaggagattgacaataactctcctaagtgtcttgtccctttcctgtgatagcttagcttagccaatcaacccattagtccttcaacaagtcttctgagacctttctgtgggtctggcatacactggacattgtcgaataggggaaatgtgagacgaatgaagtcctcagagtatagttactctcctcaccaaccccaggttctaggtcaacgatgaaaggggttgtgttaggctctaggcaacaggcacgtgccaaagtgaatggctatataggcaaacagcatttacattcttcccatgaaatgatatgatttgttagcaaattcagtctttttctgctttcctaattcattctttagagctgataaatggttatatcacttagcactgtagattttatcttaactgggttcaaaggtctatctgctgaggcatttagtggctgagctatgactctggggggctggctcaggtgtcctagtactgtcacaggttgcacagtgtcttctttgcagaaacctgattttatttggaagtcagcttccctcactgaggccagaaactgatcactcagctgactgacaccttagctttggggttccagtttctatggctggttggtgagctctgtgttggggcagcctggggaagaattgagcactggggtgccttcagtctaggttgattctgtggatttgaaaccaatttgatgccctttaggatgcgagcatcttttcaggtctctttagaatgctgtcttaggtcaggctgctagaacacatatcataggctgggtggcttaaaagacagaaatttctatctcatggttctggaggctggacctctgccactggggtgccggcagggttgggttctggtgatgtccactttccttggcttgcagacagctgccttctcccactgtcctcacatgacacagagtgagctctggtctcctcctcttcttataagggcacaaatcccatcatggaggtcttgccctcatgagctcatctgaacttaatcacctcccaaaggctccacctcatcataccagcacagtggggactagggtttcaacagatgaattttggggggcacaaagattcagtcaatagcagatgcatttctcagttgaagctaaaaagcaattccaaaaatgttttcttctttggtagattcatccggtatacactgctatgaccttgccaatgattgaaatactagaaatttagaaatatccattgcagtcactgtccccagtcccctaagtggcctcattcctgccatctcatctattctcttagatttgcccccttccctttgcagccctctccataagccagcaggtccctgctctgctgtggctggtgtctgctctgattggctcatgttcatggcatgcctaatagtttgaatatcatccctgggactggcaaaggaggcagtgtggactacaaggctggggaaagctgggaagaaggatgaagcctggagtgctagacacagatgtgctgatctgaagtgtatgccaaagggcatcacttttatagggaagtggaccaggaggagggagcgaggtaatgtcagattagaagtgagggtgtgacatctacaaccatctgatctttgacaaacctgacaaaaacaagcaatggggaaaggattccctattaataaatggtgctgggaaaactggctagccatatgcagaaaactgaaactggaccccttccttacactttatacaaaaattaactcaagaaggattaaagacttaaacataagacctaaaaccataaaaaccctagaagaaaacctaggcaataccattcaggacataggcatgggcaaagacttcatgagtaaaacaccaaaagcaatggcaacaaaagccaacattgacaaatgggatctaattaaactaaagagcttttgcacagcaaaagaaactagcatcagagtgaacaggcaacctacagaatgggagaaaatttttgcagtctacccacctgacaaaggtctgatacccagaatttaaaaggaacttaaacaaatttacaagaaaaaaaccaaacaaccccatcaaaaagtgggcaaaggatatgaacagacagttctcaaaagaagacatttatgtggccaacaaatgtatgaaaaaaagctcttcatcactgatcattagagaaatgcaaatcaaaaccacaatgagataccatctcacgccagttagaatggcgatcatcaaaaagtcaggaaacaacagatgctggagaggatgtggagaaataggaacacttttacactgttggtgggtgtgtaaattagttcaaccattgtggaagacagtgtagcgattcctaaaggatctagaaccagaaataccatttgacccagcaatcccattactgggtatatacccaaaggattataaatcattctactataaagacacatgcatatgtatgtttattgcagcactatttacaatagcaaagacttggaaccaacccaaatgcccatcaatgatggactggataaagaaaaagtggcacatatacaccatggaatactatgcagccataaaaaagatgaggtcatgtcctttgtaggggcatggatgaagctggaagccatcattctcagcaaactaacacaggaacggaaaaccaaacaccgcatgttctcactcataagtgggagttgaataatgagaacacatggacacagggaggggaacatcacacactggggcctgttggggagtggggggctaggggagggatagcattaggagaaacacctaatgtagatgatgagttgatgggtgcagcaaatcaccatggcatgtgtatacctatataacaaacccgcacgttctgcacatgtatcccacaacttaaggtataattaaaaaaaaaaaaaaagaagaagaagaggggagggtgtcagtctcccctctgctacatggccgctgactcattttcaggagccagcaccgctgctggggagtcccacttctggtcctgatggaataacagggagcaggtttaccctcctgtcttaaaaacagccggaaagctggacaagtatgtgaaacaacagttagtggacactggacaataggcagaacaggacagggattcctgggagaggggaagcaataagagcagcctcacaagtgtccacctcagcagtgccaggagagggagcccaaacagagcctgagggcctgcccagctcaggagatggagtgtgggcttccgggaggccaagggagctagaatttgcagggcagagatctgcagaagaaggagccacagagaatggttcagagatctgcaaggagtgccttgagtcttcagctgagtactggtctgcacatgaatgtgaggaaaccaccaaggaaggagcttgcaggcagaacgatctccagaaatcactcaggcctggggatattgtgtgtctgtgagagcagcttagaaatagatccctaaattatctgatagtcttcctttcaaaaagaggcgcctacacctacctcccttgaatgtgggctgggcttactaatatgtttctaaaggacagaatgtggtgaaagtgacgatgatggtttgtgactttagagactagggtgtagaaagccttgtggctcctgcttgctctctcttgggtcagcccctctgggggaaagccagaagctgtattgctcaatcagcctccggacaggtccatgaggcaagaaatggagcccctggctacagccatgtgagtcaccgtcctggaggcagatcctttggccccagtcagagggctccaatccagccatcaccttgactgcgacctcacgagagagcttgagttagagccaccagctgggccactcctggattcctgacacaagaaactgcagggaataaatacctgttgattcaagctgctaagttttgaggtaaattttatgcaacaaaaactacatttccatcagccagactgggaagaccccctaaaattcaggacatcgaggagaaaagtagaagagaattgcctcaaagaggtgacaaattagtcctaaaacaaaggctgttctggatctgccgtaacaatgttgaacatcaaggctcaaaaagatcaaactaatcgtaagtaactttactgcatctcagaacaaagcacaacactgtttaaaggaatataataaaatctagccaccaacagtacaaaactgacaatgtcccgtgtccaaacaaaaatactgggcttgcaaagaagcaggataatatgacctaggatctggagaaaaatcaatcaatataaacagatccagaaatgacattcatgatagaattagatgagggtgttaaaacggctactatttatataaccatatgcgaatgacattcaatgtaaaccctttgtatcaggattctccagagaaacaaccaaataagatagatagagatatagataaatgagaggggatttaatttggaaattggctcacatgattatggaggctgagaagtcctatgatttgctgtctacaagctagagaaccagggaagctggtgacatagctcagtctgagtgcaaaggcctgagaacctgaggggccatcggtgcaggtcctggagtccgacggctggagaccctggagtgctgatgtccaagcgcgggagaaggagggtgtcccagcttcagaaaagggagtgaatttgcctttcctcagcccttttgttctattgaggaattcaactgattggatggagcccagcccacacaggtgaggatgaatcttccttcctcactcagttcactgatccaaatgccaacctctaccagaaacacactcaaagacatccccagagacaatgctgtaccagctatctgggtatcccttaacccagtcaagttgacaccaaaaattaaccatcacacccttcaattataacttccccgcactttgcgaggtcgaagcaggcagatcatttgagctcaggagttccagacaagcctaagcaacatggcgaaaccctgtctctataaaaaaaaatacaaaaattagctgggtgtggtgggactcatctgtaatcccagctacttgggaggctgtggcaggaggattgcttgaacctggtaggtggaggttgcagtgagccaagatcaccccactgcactccagcctgggtgacacagtgaggctctatctcgaaaaaaaaaaaaaaaaaaaggaagaaagaaagaaaagaaaagaaagaaagaaagaaagaaagaaaagatcttcttatcaattgatatggggttaaataattgggggataaaaaatttgaagccatcttcccagagatgacaataaacagaaataaacaagtgaaaacccagaagatctgtggctgctaatcagaggaagcaggtctgaacagggaaccacttagctgtagataccaagcagtgtccaacaggttgcttagcagaggcataaaatcatgacttttctcaggcacttctcataaatttcttcccagagcaatcagagatgctgcatccagtttacttattcacaatttgggcacgaaagagatcttcctcaagccacggagaagacaggcttgacaaggagcaggacggccttcacagcagcacaaatgggaggccctgtgaaattctccctggaaggcagagctaagagatgtcagccctgaggcttagcatccccatagagggactgaccaggagcccgggagtcctgccccagctgtgtccctaagttgctgggttaacctctgtagaatgtgaggatggcctggtcattttcattctcgagagacactggagagaaaaagaacattttgtgaatgatgtcgtgtgtccacaggtaactctgaagcgtgagctgccagaattcaaggccacctgcttaacagaagacaactagaaacctcatccatgagcagagtaagcactgctgttcagtagttctattactgttaaggtgttatgaccattagataaataatattgtttggcaactgcaaggaaaagaactgcgtaaattggttccaaacattgccactcgagctcaggagtttgagaccagcctgggcaacatggcgaaaccctgtctctataaaaaaatacacatcctggctaacacagtgaaaccctgtctctactaaaaatacaaaaaatgagccgggcaaggtggcgggtgcctgtagtcccagctagtcaggaggctgaggcaagagaatgatgtgaacctgggatgcggagcttgcagtaagccgagatcgtgccactgcactccagctgggcgacagagtgagactccatctcaaaaacaaaaccaaaccaaacaaaacaaaaattagctgggtgaggatgttgcccaggctggtctcgaactcctgaactcctgagttcattcgtcagtgataagtccatgcaatcactgagtggtaagagcttgaactggtaaagtgatttgatattttattggttatctggatcccaatatatctcatttaatttcctcccaaagctgctgagatggggatggttacctctgtttaacagctgaggacgctgaggttcagacagcactcagccacgtggctgagctggacttgaatttgagcctgttggattctgaaccctagacttcgtgcacctgaccaggttgcctattattaatgagaagatctacagtcatgtgccgcataccaatgttctggtcaactacagactgcgtatacgatggtgctcccatcagattctaataccgtatttttactatacctcttctatgtttagataagtttagacacacatactgacccattgtttgcctctctgggcctcagttttcctatctaaggaaggggggactcttaagggttttctacttctgagctctccttagcattctgtctgtgtagctgttttcttagcactggagaatgtgagacttgagatgtgctgcttaaggctgtgacagccccacacttgtttagcaaggtcatgggtcatggcgactcagaggactgactcatggtgatatgcggggtctttttgttcctcctggaattagagcccactgtaacagtccacacttcccagcatagcagccactgtttctaagtaatggagttctctcctcccatccctggtcatgttgaggtctctttccctgtccgctcctcgcaccttggtctctttcttctttcctgcctctctgctgttctgtgtcttagccccgctcattatgaattgttcccaatctgaccagaggagaaagggcgttccagaccccctctggcttcatccagtgggagacaggcatggggcttgctgtgagctcccgagctcccccgcccaccagcggccagccacggccttctttcaagcacctgtgcgtgcctgactgctgtgcatgtgctgctggctggcccgtggttcattctgctccttgacacctggcctagatttgcctaggtcggtgcctgcttaggccaccaaggtcaggtgaatcctcttgcttggggacagggcaggtcaaatcctgcatcagtgcacggcccttcagttcacagcggcctgaagcactgtgacagtttttacgcgatcacaacccagactgtgcactccctgaggacagacactgtgtctggtctgctcccctttgtagcccccagtgctcagcctagggcctccaagatgctcctgtgtgtccagctgtcagcctttatcactctgccacttcctgtgcctcaactctaatctgcaggccctgccctaactgtgaagtgggcctctggatagcccgggtgaccgtcaaaaccttctgtgctttggttccagctgtttgctctccgaggatcactgtcctctccctgcggaacccagaaccttttacacctgcctcttccccatgaaacttccctgctcagccagccacagcacccagggggccccattccaccttgggtggattcccaggctgctctgttccctgccaccaaggtagtgaagcggcaccaggtggcccctggttcccacctggttcttaagagagtgcgcaggacaaagtcacctcgtgaggggcccccaaccaaggagtggccttagaccccgaggagatgccctcccttccccggagccccaggcactggtgccagggataaaagtctgcacctctaggggaagaattcattgtcctctctttgggatcctttctgcccgggcagttacagagctaaccatgctcagagtcctgggggatcagccagtgtttctccttcctacagtagctcgcagggcacccgtgaagagggatgctcattcttcccgcctaccttgccccaggtattctgggcctgtgtaggtggttgatctggacaacttcagagttctcgggatacaacagctactgtcaccagctgggctcagcagtgaacagatccttctgggaatggccactcctcaacttatggggttttagaattgaaaaatcttccaaccccacaactgtgacagcagcttcccatgatgcctttttcatcctcaaagcagatctgtgtcatgtgcacctgcagcccatttcctggattgtgaaactgagcctctagaatcaggatgcttgtgctggctttgctaaggcattactcagcccctccttcctcctccagtcagctagagcaagattactcatccctggagttccttctcctcttccgagtgcagctaggtcctgggattggccagggggatcgcctcagctctcctggctgagtcactgctcagtcaggcctggttgctgatagcacagccaagggccctcccagggggactccagccagtgcctgatcaaaagcgccagggctttggaaagtccggtttcgtttatcgcctgggagtgcactgtgatctagtgagtgttttcttctcattgcttgtttatacaaaaggctccccccaacccttggccttccccgaggtggtaggctgggcagcagcgggacctaatttgctctgaatccagccagaccctgctcatcagagctgaccctagccgtgctgggccccccagctcatcattttcagaatgagggctttgagttgaattgtcctatattttcagacctcccatctccacatttgaataatggacttattttacacaaaaaataaacttaagtggcctgaagttggactggcttcctggaaagcctttccacatagagtagacttcttcccaggccagctcctccctggaggtgggaggggagggtgcaggagggcttccttctggggccttgcaacctcagcagttttgggcagccgtgatgcacttgaaactctggtctctgagaaaacccctgtggaggtagctcacctacaaactgcaagattctctttgtgtagctcccacgtctgcaatgtcagcatgggacaggctgcctagataggagctgccccaagcccagcgggagcgtgtccacacttgaccagatggacgggagccgcgcccctggacaaagctctccaagcagctgtccccaaacatctatctcaagcttgctggcttatccaattcactaagctgccgcattcgatgctgtttctaagctggcctcctccctggccctctgcatctcagcagagcagcggttccatctccacactgagacttgcctttgagtatcgcatcacacacctccaccggttccattcatcagtaagcctgtgggttttgcctccaaatctctctgaagtccttccgcttcttgctgagtagcccctgtaatctgagccaccatcatgtcccccggtttcctgcagtgccacctgtctgctggcttctactcctgcagtccattttccatggagtggaggggtgactttttaaagaagtaaattagatcatataattcccaggtttaaaattctttttggaccaggcgtggtggttcacacctgtaatctcagcactttgggaagccaaggtgggaagactgcttgagcccagcagtttgagaccagcctgggcaacatagggagacctggtctctacaaatagtttgaaaaattagctgggcgtggtggcatgcacctgtggtcccagctacttgagaggctgaggcaggaggattgcctgaggccagaaggtgaaggctgcagtgaaccgagattgtgccactgcactgtagcttgggtgacagagtgggaccctgtctcaaaaagaattggtttggaataacatttaaataatacctaaactccttgccttggcctacaagacctgaatatttggcccctgccttccctccagcccacagcaccggccccaggacctttgcacctgccatttctgctctccagaaagccctgcctcctccccatctttgtagtcataggtgtttcttgtcatttagagtttcagttcaaatatgacaccctcccattgatggaaatcatttcaccaccagacgttatgtggctcattgtttatccgctgcctgcctcccggctggagaggcgcagggagctgcctgtccctcctgttcagagccaccgttccgcacctggaccaccgcttggcagaggcgggagtggaggctgtcaccatcaggatgaaggacaggggtggcccggcgtggagaagctaagaagagatggcgataggtcaacgcgattgcgcctttaaggtggaagaaacgaagggcgagggtcagtaaagtcaaggacgggctcagatcccgccactggtgataagcgggacccataggaccgacgtgatcgcggccaggccctgggtggtttacctggacttttacctggctgccttttctctgcacccctccgtcctcactcccccagtcatcggcataggtcaagtcagagtgttgaagaaacacacgagtttggctctggaaaggaaaatcagaaaggcggcctaaggggccccacccccaggaacgctaagataggcggccaggggtgagcgggcagggccggccagcaggccctgaaagcagccgggccaccagcgcgtcccgagtccccctcgcaccgccccgcttgccccgcccctgccctctgcccccgcccctgccccgcccccgaaggcgagctgcgctgacagccggcggcgggctgggtgtttgcaatacaaaggcggccacgcgcggcgccgctcggtgagtagccgccgcctccagcctcccgctgtggagcaggggccgcagcctcgggttaggcggggcggggcgcggcgccggggcgctgaggacgcgtggcgaggcgggggctcggccccggggcccgaggaccgacggccgggctacgtccccggggccctctacgggaagtggttcgggggagggaggcggggaaacaggccccggaggccgggagggcctcgcgagcatccctcgggcctggctttcctgacgcgccgcgaggcccggtgtgggcccggcttggctgatctcgagcggcgtaggggccactgggggctgccgcgcagtcccagaaccgcggggactagctccagccggccagcgcgggtgcgtcctggctctgcgcgatcatccccagctttgcgccggggactgggatgagagcctttctttcccccggagttaggattccagcgctgcagttgaggaaactgaggctcagggaggttgacctctgtgcccaaggtcatacagttgccgggcggcagggcaggctgagcccaggttggaatcccggttctcatattacagctctcccctgcgaggcctctgcacctttcttgcagcctaggaggtgctaggcctagtgagctccgtcagctgctcctgcacgtaattttattatgggcaaggccaggaaaatgcaggatgagaagtaacgttttgggagtaacttaagtgctgtggagctagagtaggtaatttgtgtggtcagtagttgctggagaaagcagatgtcaaccctgtttttgatcagcaagcaggaaaccaactaagacaactggcagtattaatttggagatgttttagaacccggcagtttcccacaggatagaagtgttttgggaaatcaaagcttgtagccgtttttttaattgggggtgttgtggtatggtggtctaggggtagtgattgtgagattgactgtttatcctttgttccgtaatttgggtcttattaatgaaagtaagcagttgaggaatgtatagtatttgagaaataagcacatccacacatgaacacttttcttgctcccagattcttgttgaaaggtgtaacagttggatttatgattatatactttgatagcacttcacgtttgccagcatttgttattgagtgtttttgtgcatgggttgtgtgttttggcgcttattattcctatttgcatgtggggccctgtggtcctgtggagccaggcctggatatagccctggactcgggtcgggaggtctgggctctgcctgagctctgtgggaccctgagcgagttctttcacccacccaggtctcgcttatcagcagttcctttcttttagaaaagcacagggggacaaggggcggacctgctgagtcttgtggtgtgggagagaacgcgagggttcaggtgagagaccgcagggattcctggttgtaggggggaccttggaagtgactgagaaggagcctgccctggattaggtggggacaattggcctggcccagccagaaggaagtctgtgggtcctgctctcctgctctttgcgtggtcagctgcacaaagggcccagaacagacggcaggggagggtcaggagatgaaaagatatttcagaagaaggtcctgaggccaccgtggtctgagatgcgccgaggccggcacagagcactgggctttgcagttgttgttctgaccactcacagatgtagaacttgggcagaagacttcaatcctctgagcctcagttttcccatctgtaaaatgaagggataatcatacccattcacaggattgttgcaaaaattaattgagataaaaaagagcccctggaacataatatggggtccacgaatcattgtggttgttatgattttaaagtgccacagggtgccagcgaggaggggctctttgtggggttgggacagtcctggctgacgccggcctctgctctgtaaatcatccctgtgggacaccccctccccctgcctgccacctctcttccggttggcttttccggaccatctgtgtactgggttcaaggcctaaaaggtacctaaatgaggttaattgatttgggcaagcctgccaatgggggtagtcgaggggtacaggcagctttttccttagggtgggagggggctgttgcacggatgtcggcagcttttggagcattttgagagacatccaggtgttaggtcccgccaggacaccgaggctggtggttcgacctgtttgcacttgcacttcctcactggtagcccgggcgtgggatcttggagcttttgaggggtcctgaggaggaagtccctggaatcacccactagcagctttggggcttgttccttgagaagggcaaagtcacaattttgacactttattgaaccctggaccaatgtattgtataataagcccactcatttaaaactggaacggggtgtgtggggaaaaaagagttgggacaaaacccaagcaaagccgttcagtgacgtcacaggttcttcattcagaagaggcccaggtgcctatcggatggctgtttctgaaatgttcgctttctgagctgtgagggagggtctggagagagagaggggcccatgcctgtgtgtcgaggggacacacccacactggccctgctccttgatcagaggatgcaccagcgcctgaagggaatctgtgccccctaggaggccacactgggccctggggctgctggggtccgaagcaagtgccctgacctcccttcctgtgggttcccttcctcttcctctttccacagctttcccctgtctgtctccctacctgtaattcaccccaacaagcccttagcagctggggttggggtggggtctgtgcagccagggatatgttgagtagtgagtttctgcctgtagaaagctctgggtctgggctgacccagacccaggctgacacttttcacaatgaggtatgtggcccaggagtcttaaaacctcagcagtgtctggcccacaggctgttctgcacactgagggatgcagggcgcgttgtgccgctcccactcccagctgagaggttgggaggaaccagatggactgggctccatcaggagagaagccagaagcattttcacaccggtggtcatggctacagggtcatggttacagtggatttttcaacccactgaccaaatgttgtgattcttgcaacaacttaaaattttcggctgatgctgaatgctggggctttccagaaatagccataggctgttagaacaggcactttgctctgtaaggaggcctgtttgttcctgagtgtgagctgatttgcattggctcacaaagttgaccacagaccctgcatgggagacacaaccaacacccccatttgcctgctggcacgcacttgtgcccccctcccctccccggcctcgctccctggaagccctcgcacctctccccttgccctctgtcccctagccacacacactcactttttgatgaagtcgtcctccgcgttcatggatctcactaggctgtaggtcttcagtttacaagacaggagacaagcaacaagggttttaggataatgggcaccagacaagacaggcgcccagacaactgttctggcaaaacaatgtcccaccattggactctgtgcaatgccagaatgccaccagtctcggggtggcctctttgggctcagattttgggcaaatgagaatgtggaatgtaggcatagccttcaaatagttctgtattcattttaactagtaatattctttgcctctgtctttttgggaaggtactatttaaataggtgatatatacaaagtcccctctggcaagagacgttattcaaagaccggattttgtctggaaccagtttgtggtcacagaattagcacgtggtttttatttggtgcatgtgctttgaaaagtactttacatttactgcctcacaacagtcctatgaggtggctgtgctgatgtcatccctttttataaaatagatgcgaaactgcagtgcagagagcttagtaacctgtctttgatcacagagttagtggaaggtggaggcaggatttgaatacctccagagcctgcgctcttacctgctgagctatattgtctcctaatagtgccctggaacacccaggtgatatatgcccacctcccaattgctggggtgtggtaggggtggggggtaatacagaaataaagttataagggcagagcattctttttgaccaagacacgaatttggacagagggctcttgaaagtgcgtagagagaatgtgccattgggtctttgaaggaaaagaacgtcctgtccttaatcagtgagctaaataattaagagccaaaggatcggagtcaaagccttgggctgttttgctcagcatagttgtcataccatatttagatgtctacacccacctttatccaggccatttgtatttcttggcaggaacgtgagaacaagcgtcacctggggttgtggtatctgagggttgcaaagtgtcagcgctggaggagctgagtgatcactcatctgaccttccctccaaagcaggagtacccctgtccagcaccctgtcctgtctcagtggtttcagtgatggagaccctgagactgagtggaccagagttttccatccttcactcccagttctctgaggttactaataattgacatgaaatacatgcagacataaaaaacacaagctagaaagcaacactatgggaagtatttatgataaaaagtgaagatctcttcctccttttcccaggctggtccccaggggtgaatcttgtgaatcttgttttgtatgtatctcattccagaatttttttatgcatatcaaaatatgtacaaatgtaattttttaaaaatgggtccagctgggcgcggtggctcacgcctgtaatcccagcactttcggaggccgagatgggtggattacgaggtcaggagatcaagaccatcctggctaacatggtgaaaccccgtctctactaaaaatacaaaaaaattagccaggctggtggcaggcgcctgtagtcccagctactcgggaggctgaggcaggagattggcgtgaacctgggaggcggagcttgcagtgagccgagattgcgccactgccctccagcctgagtaacacagcgaaactccgtctcaaaacaaaacaaaacaaacaaacaaaaaaccacaatgggtccatattataagtatttttgtacctgttttcattctatatatacattttcatgttaatatttatggagctacctctctaccattttattatcagcctcataatattccattttacaatgtggatggcccataatttattaagccagagtcatacagatattaagttatttctgattttccctattacaattaatgctacagttactgtttttgtacacggatcttactgtatttgtacaatcagttcccagcggtatagttgctagggtttgccaataggtgccccaaaagatgggcattgccacattgcttaccccatttatgaccctgttagtagtgagtgacgatgtctgattctcctacttttcatgggccctggggttttaatgaaatgctttgattttggaccatctgaaaggcctctttcgattcctgtatctttaattatgaatggggttgaatatctctctcatatattattggccaaatgtgaactgtctatatgttttgtccattttttcttttgagctgttccaaggccattttttttttttttttgagacggagtctcgctctgtcgcccaggctggagtgcagtggcgggatctcggctcactgcaagctccgcctcccgggttcacgccattctcctgcctcagcctcccaagtagctgggactacaggcgcccgccactacgcccggctaattttttgtatttttagtagagacggggtttcaccgttttagccgggatggtctcgatctcctgacctcgtgatccgcccgcctcggcctcccaaagtgctgggattacaggcgtgagccaccgcgcccggcctccaaggccattttaaactgaccttaatcttctagaggtggctggtgttggcaaaaattgtggggttaggaaagctgtggcaggggttttgaattttggcagttccaagaaagcagcgtttcttggcaatttgtgaagcctggagatggattctgccaattttggaataaatgtggaattttctaatttaatcgtgaggcaagaaaccatgtgacctctgtcacctcatcctgacagtgtccgcagtgctgtcctttctggaactgtatgaaattgcggtcgtgaatgctttggagcgtctgctgtgtgctggagttctacagatgagcttaattatgggaacgccctcctgtccctgggcaaggagggggatgagcagggtgggggtgtgctggaggaggagacgcctgccactttgccaccctggaagctcactgcaagagctgcaaaatttcccacctgcctaacacaggcagggctttggtggcgggaccccagggctggctgtttttgctctttcatcacttttgtcaggaagtattgaaagacctttaaaaggcctctgacttgcagggcctctgacctgcaggccttttaaagcatctccagcttttctagtgagtttttgtattttggacgggaatgtctcacgaaccctggcatgccaagaaagtccccaatttcccagcaggtagtgatggatgcagagctgtgctcttctgtttaagaagctcctcaaggcactctggccaggacagtttaaccacagggacgctggtggactcagtcaatccagacctggcagagggcagcagctgcctataagtgtgtgccagttacagcagggcgtgggctgctgcccaggtggcctgactttctgtctgtgttcctttccctgtatcaccctgagtctgagccagacttcctcttttgtcacaggtaattcatcacccttatcaaccgccgttaagtatcagtccacaatgctctgaaaagacttcctctttgccgtaagtgtaaattacaggaggaagctaacactatttataaatcaatttcattttcatgcaagtcttattagtcatgataccattttgggcacttcctagaagctttttgtgtttttaaatgctttggatgaaaatcctcatttgtcttgtaaacctccaaggtggatgtgatctcggcgaacaccagtaacagcgtgatgtttgtgactttatccagtgctgggcggaccacagatagagtccccaggtgctgagacactgactgtagtgtgctcagaggagggcggctagggcagtgagcaggaagccccaaaatcgtccctgtcaagcccagctggggagccgacagtgccttccctagaggaagggtgccaggggtggtcatttagttgtcctgacatgatccgttggccccacgagcagcagccaggtctgtatctgagagctgtaatttcctgctgataacaggaacacagataaggggcaccccatcccagagtgatattaggttggcttttgaatcaccaggctccttggatgtgccttaagcccacaggtgccctttaagcacctgccgtgagggcagatgtgacagatcgtgtttgctctctgggcagtgagtgggttttgggtagcttctctccaggaaatgatgaatcactcggagctgagcaagtgccagagaagtcttcaatcacagactgaacccaggagggtgtttcggcctttctaagtccttaagggttgtagggaaggttttgaacaatggcttttgactttaccttctgagaggctctgtcagggagtggtgatgctgcgggtgagagcagttttgaaggtgtcacatccagggccaaccctgagccttgcttctgtagccacctcctatgggaggtcatgacaataataagattttgcatgtgttgtccaggagcaaagacctttccaaactagtcgttgtgttgaccactgaggatgacagcctggtgggctcagtcagagccattgtgttaataccctgctcccacacacatagctggtaaatgccagaagttaacactcacagccaggccttccgacccccaattttgtgtcatttctgcttttcagtcttacccttaggtgtcacagctgtttatttaaactgtttgcagtgaattttgtttgggagcattgtcttgtgaaatttatgctctggcagagaacaattcctgctgtcttcttcatttcttctaatttttttttttttttttgagacggagtcacccaggctggagtgcagtggcacgatctcggctcactgcaagctctgcctcccgggttcacgccattctcctgcctcagcctcccaagtagctgggactacaggcgcccgccaccatgcccggctaatcttttttgtatttttagcagagacggggtttcaccatgttagccaggatggtctcgatctcctgacctcgtgatccgcccgcctcagcctcccaaagtgctgggattacaggcatgagccaccgcgcccggccatttcttctcatttttaaattttagtgcttttccccctcgtgccccgacttgccaagctactttgagggtggtgggtgcatcttgctgttttacactctggaatgtcgtgatgggaccaaaaataaaagtttcttgcttgagatgggccctgcgatggggcaggtaccgcgtcagaaatgagcaagcctcgtccctgtcctcaaggagagaagactcacttggtagacagatgtctgttcagccacttgacaaatgacagtaatattgatcaagctactgccctggatggctgggctggagggctgaggagaaggttgaggctgaaagatagagttgtgtgggcatgtttatgaaggggtcatatacctggacagccgggggaggaaatggaggaggcaggtggaaatccagatttgaggggtaattattgttcaactcctgcaagacacttagttcttttttttttttttttgagacagagtctcgctctgtcgcccaagctggagttcagtggcgccgtctcggctcactgcaagctgcgcctcctgggttcaagcgactctcctgcctcagcctcctgagtagctgggactacaggtgcgtgccactgtgcctggcttattttttgtatttttagtagagacgtggtttcaccgtgttagccaggatgatctcggtctcctgacctcatgatctgcccgccttggcctcccaaagtgctgggatcacaggcataagccaccacgcctggccacttagttcttaaagaaaggagagtaggaagaaaagtacaagtgagaaagatgaacaaaaacggggattgtaagagtacatttattgagacagttttgcatttgcatttgctcggccagtcttatatataattagatgttgcttaccatgacatcatttcatttccaaggagcaaacccacaatgtgaaaatggacccactgttatgtcccagataacgtgccttaggtaatgttctagttgaaggaactagaaagggaattaaaatcattgttatttacttgcataataaatgagtggaacagcagattcctgaattgtccattaagaggcgtggactaaaataattcaaatccctttatttatttatttattttatatttttttgagatggagtctcactctgtcgcccaggctggagtacaatgacgtgatctcagcccattgcaacctctgcctcctgggttcaagcaattctcctgcctcagcctctcgagtagctgggattacaggcactcaccatcatgctaatttttgtatttctgtagagatggggtattttgtagagagcctgaccatgttggccaggctggtctcgaattcctgacctcaggtgatccgccctccttggcctaccaaagtgctggcattataggcgtgagtgcccggcccctatatttatttttaataatcgatgctgttcgagttgagtatgctatttattattaatgtcataggtagaattctaagtggaatacgcttgtagatttttatgttctttggtgtattatctgtttggttctaacataaaacagtttctaacccagaggtatctggaaagatggtattccagtgggatgtaataacctcagaaaatttgtattatttcagaaggtcaagctagacgatgtcacattgaaaaaacttacatgtttcttaaccttagagcttttctgaaaatccacagttagagaaacccagtcttgccaaaggatatttgtaagatttggctgagttttccatcaaaaacatttgaactaggggttgtagagtcctgtttcaagtggtaaataaaatcccgtgaggtgaagctgctatttcttgccaaattttgagattaaagtcagtaggtttgaaaggaatttggtatggggtgagtgaatagcaggcatctgaaagccgttccactggaaattgaagccttccatttggtcctctgcaggttttgtttatcgtttgtcacccttgaggtaattaagatactttcttctttaaagcagatattcccctcactgcttgatcacgtgttttagcagacagcaggaaactgacaccaaagacagtcatgagattaatgggcaggtatggggaggtgggttgattggctgggtttgtctgacttcttcaggtaaattagcttcttcctccagccttttactcgaaacataactgagagtaaaatttgggaatttatgcccagctggtttattcttgtattctttaaacatatgtgctagatttatttcaaagagagcttggaggaagggcagagaaagaagagcctggctgcctctaacctgcctgcacccctccaggcaacaggtgcctggggtgactgggcccaccccggtcccttaaagggcatggtccctcccgtgcctcctgggggagggattgccccctccaccccaagctctctttcaaagaaattgtttaaccaaatagtatcctggcttcctgaaatgagttctggttaatacaattttctctctccccaattcttaaaaaaaaaaagttaattgtgataaaatacatataacataaaatttgccattttaaccatctttaagtgtgtggttcagtggcaaaatggaaaccctgtacccattaaacacacactgactccctattttccgcttctccctagcccctggtaatcagtctttctgtttctatgagtttgtctgtctaaggtagctcatgtaagtagagtcatacagcatttgtccttttgtgactggcctatttcatttagcctactgtcctcaaggttcatctacacagtagcatgtatcagaatttcctttctttttaaggctcagtaatagtccatgatatggatggaccgcattttgcttttccattcatctgtcacactggagttgctgcctccttttggctattatgaataatgctgccacgaccatgggtgtgccaatatcttttcgagacctgctttcagtttttttttttgatatatacccgggactggaatggctggatcataagctaattttatttttatttttttgaggaattcagactattttctgaagtggctccacattttacattcccgccaacagtggacaagagttccagtttctccatatccttgccaacacttgttatattctgtctttttttttcttaaatagtagccatcttaatagatgtgaggtggtggtattcacccttttaaaaactttcagtgcttagtttaaggcaggcccagggtgtagatgttgagttcctaggaacagacaaaagactgccaggtggagcccatgaccctgtcacttgttgagaattattgagaagatttcctgctttcaaatccaggtattttcagatttgcaaagaagttattcaatagaggggacagctaaagatatcaaagcaccactaatctaagctaaagccacagctgatatcaaagcaccttctgattctttgcggtaggaaaatactccagaccaatccagtgggaaggtcacagaagaaactgtagtcttggctctgtctttgccatggggggagcttcgctaagtcacttcctgtttctgggcttacttttaaaaaatgaggttgttggaacaacaactaaggatcccttagttgagaacaagagagcagagcaacgattcagttattaaagatgcttcttcagttgctaagaactaaggagtggagcctttgtcttggaacggatagagctggaattagaccttgcaggtcactcaggccaatgcgccccctttacagaggagaggctaggatgcagagatgtggtaatgctatccagttatgagctagctagcttgctttctttcttttctttctttctttctttctttctttctttctttctttctttctttctttctttcttttctttctttctttctcattcttgggtgtttcttgcagagggggatttggcagggtcataggacaacagtggagggaaggtcagcagataaacaagtgaacaaaggtctctggttttcctaggcagaggaccctggggccttccgcagtgtttgtgtccctgggtacttgagattagggagtggtgatgactcttaacgagcctgctgccttcaagcatctgtttaacaaagcacatcttgcaccgcccttaatccatttaaccctgagtggacacagcacatgtttcatggagcaccgggttgggggtaaggtcatagatcaacagcatcccaaggcagaagaatttttcttagtacagaacaaaatggagtctcctatgtctacttctttctacacagacacagcaaccatctgatttctctatcttttccccacatttcccccttttctattcgacaaaaccgccattgtcatcatggcccgttctcaatgagctgttgggtacacctcccagacggggtggcggccgggcagaggggctcctcacttcccagaaggggcggctgggcagaggcgccccccacctccctcccggacggggcggctggccgggcgggggctgaccccccacctccctcccggacggggcggctggccgggcgggggctgccccccacctccctcccggacggggtggctgccgggcggagacgctcctcacttcccagacggggcggctgccgggcggaggggctcctcacttctcagacggggtggctgccgggcggaggggctcctcacttctcagacggggcggccgggcagagacgctcctcacctcccagacggggtcgcggccgggcagaggcgctcctcacatcccagacggggcggcggggcagaggcgctccccacatctcagacgatgggcggccgggcagagatgctcctcacttcctagacgggatggcggccgggaagaggcactcctcacttcccagactgggggcagccgggcagaggggctcctcacatcccagacgatgggcggccaggcagagatgctcctcacttcccagatggggtggcagccgggcagaggctgcaatctcggcactttgggaggccaaggcaggcggctgggaggtggaggttgtagcgagccgagatcacgtcactgcactccagcctgggcaacattgagcactgagtgaacgagactccatctgcaatcccggcacctcaggaggccgaggctggcagatcactcccgattaggagctggagaccagcccggccaacacagtgaaaccccgtctccaccaaaaaatacgaaaaccagtcaggcgtggcggcgcacgcctgcaatcgcaggcactcggcaggttgaggcaggagaatcaggcagggaggttgcagtgagccgagatggcggcagtgcagtccagcttcggctcggcatcagagggagaccgtggaaagagggacagggagacggtggggagagggagaccatggggagggggagggggaggtttctgttaatgctgcccttatgtctctcgctttctttttcttgtgagtaaaaaaataccaacagtagttcgtagatgtgctggcctggggttggggcctcactgctggggaggtggtctcatcattcggtgacaaacatagctcacgtgcaagggtgatgaaggcaaagagatgggggggacatgagaaggagcttcacagaaccgaaagagaggtcacttcaaaatccaaagacctgggttccagtttggtgaaatggggcgtgtcaatccagagagcccctcttcaccagccctgtgatcttcattgcactttggctgtcttctggttttaccatctgaaaggctgcattcctacagggttttgtgacagtcagcatgagataacgtatatgaaagaaattgtacaaagatgttattaatactgcttgcacgtagttttagagttagagggttacctctcttaccaaacacacgttaaaatctaagttcaacgtggaaggaataagaagtattagggttacaaagaatcatttcttatattgtacatcttttcaggaaccatcccactgcaccttttttgcatgaagttaaacctgcaccacttgtaaacttagaaaaatgtgtgttttgatgtttatatatatgtgatgtattagcaggacagatcaagggggagctgggctctggtgtttactcccaggtgaaaaggaaggcagatgtgtgttcctccttgagtgtgtttactaagggctgggcttgtttcctcggttgagagaggaggtgtatcagtacagagagcttcatttaaaattgtaaaatgaacctgggagggcttcttgcattctttgtaggtatcattcatgacttctggttctctggcctgttctaaattagaattaaatccgcagttcttaccagcccctgcatgcaggggatttgaccactcttgagcctcatttgcaaatgggtgtgctgatctcacttttgcttatttcataggggttgaggtaagatttacaaaaggtatattttgtttttttaacttgaaagaccaaggctttatccttggccttaagaatgtagcttataaaagaacaaacaaaccatacaatttcctctactctcatacacgcttctgacaccaaacgtgtgtgtgtctcttgcacgccaagcagttctccagctctcggagcacaccaactgggtgcctataattcaattcaattctgacaccatctacctggagttagtatcagattccacaggttaagggctcgttcccacaagctgtccctcacttcagatgccagtcacagtctgggcctcctgtgcttctgcttgactggctataaatcgggggttcccatgaccccctcctcgcgttcattcctttgtggatcggctcacggaactcagggaaacagtttactgattgtcactggtttattataaaggatgcaactccggagtagccagatggaagggtgcacagggcaaggcggtggaggcggcggtggtgcttccatgccctctctagcaccccagcctcccagcactgccacgcgttcaccaacctggaagttctctgagcccctttctttcgggttctatggaggctttattacaaaggcgagattgattaactcatcggccattgattacacttaatctccctcccctctccctccctggaggttgggggtggggtggtgggtgggtggggagtggctgaaggcaccaactctcattacagatttgttcctctggcagctgtggtccagcccccatcctccgagagtcctctgattaaactttggtgtgggtgaagagggcttatcatgaatgacagaagacactcctttcacctttattgctctggagctaaggagctatttcaggagcaggggaggaaaatgaaatatcataacaaaagacattcctatcactctgatcacttagaaattataaggggtttaggagttctggcttggatctggggatgaagaccaaaatatatatttcctattacatcataatatcacagcgccactgaatgataggaaaagctcccagaaccaacctttctacacagcaggtttgtgagccacaggttcacacacgtggtgtttcctggagtctgtaggtgacctgaggtgggggttttgtcagtgtggtcacatgtgtcctgggatagttgccttgaagaatgggagcagtgtggaccaggaggaggggtgaagtctcggggtggactggaagttacgtcatgcaaatccttcctgtttgggcagtatttgcaaccacgtggcttcacgagtccgccaaaccatcaggtgaataaacgggagaggagaagagagtctaggactcagccctggagtataagtcagagctggaaaagaagaggctccagagactggacggccactgagaggtgccacgtccctgaagggcctgaggagggttgatggcatgaccccatgaagcccagcaaggagtggagagaggagggctggaggactcccgcctgccatgacccagtccagggataagatgtgagtgccatgggccagtcacgaccgccggttagcacagcagggcacagtgacggcagaaggctgggagcggagagccgggcagagtggacagtgatgtgggcaggtgtggactgcaccaggtggtcagggatccagagctacgaaaagaagggcataacacggcggcagctcgcagtccagctgcttgaacccagaatatctcttggcctgtccctttccctctttttcgtctgtccctacctcctttccaggcggggaaggaatcgtttctctcctagtcttcctgccgtcaggtttttttcttgccagtctttacattgttacggtgatgctttttctaaatcttggatcaaagtgtcattttgttccagaatccgatggcttcacacagcagagcccgcatctcctggcacggtttcgcactctccattcttccctagtgcacattctgtgttctgggtgcagctccctcttccagtctggtggttttaagcttccatgcttctgcatggacctctcgttgtaccctgtccaccttgtcgtctgacatctgagggtgtccctgtcctccaagcccgcctccagcgccagctcctctgatgcaccttctttccttgatcataactcccttagtgtttacttaaaacaaattcggtgacactgacatatattttagtgtgtgtgtgtgtgtgtgtgtgtatatatatatatatatatttggagatagggtcttttgtccagccagagcaagatcctatcttcaaatgtgtgtgtgtgtgtgtgtgtgtgtatatatatatatatatatatatatacacacacacacacacaacgactaaaatatatgtaagtgttgctgacatgcatttatatatgtcatatatatggtcttgcgctccgtggctggagtgcagtggcacgatctcagctcactgcagcctccacctcctgggttcaagtgatcttcccacctcagcctcccaagtagctgggactacaggtatgtaccaccacgcacagctaatttttgtgtttttagtagagatgggattatgccgtgttgttcaggctgatctcgaactcctgggctcaagccatgcacctgtctcattctcccaaagtgctgggattataggcatgagctactatgccccgctagttccttgtatattacctgtgtttccttcacgagcctgtgagtctctccaggggacaggactttcttctttatctctggtgtggccccaggccctgtagaggagagatggcctgaatgtttgctaagtggattgcagttgacagctggccagcagcccagagcgctggtgttccctggagcagtggagagaagtcagacaggcaggcaaaggccacatggaaattgtcacaaacaaaaatcattcatttcccttctccagtaaaagcagtcatttgtttttcaactaatatcaagtagctactatgattggcacgatgggggatcctacgctgtatgaaatagtctctttcctctacagtcttgagatttagtgtgcaaaacctgtccatcatgacagaagaaggggcaggtggcagtggtcctaaggacaatataaaaaagcttcatgggactgcagaggagacagggcctggggacaactgagattagacatcatggggtcaaggctctctgtgctggactctgggagagtggagactggtgggcttgctgtgggagttggggtgataggccgtgatgggccatgatgggctgtgatggatcctgatgggccgtgatgggctgtgatggaccctggtgggctctgatggtccatgatgggccatggtggacactgatgggccgtaatgggccatgatggaccgtgatgggccgtaacgggccgtgatggaccctgatgggctgtgatggtccgtgatgggccatgatggacactgatgggccatgatgggccctgatggaccctgatggaccctgatgggccgtgatggaccctgatgggctgtgatgggccgtgatggaccctgatgggccatgatggacactgatgggccgtgatgggccctgatgggccctgatggaccctgatgggctatgggggtggatagaacacattccggaaatgagaggagctgaaagttgagtgtgtaatccacgtttttgaaatggtgaggagttcattttgattggctcttccttggattaattgtgtgtctgtgtgtgtttttttttgtctgttttccaggtgcagaccatgaattacgtggggcagttagccggccaggtgtttgtcaccgtgaaggagctctacaaggggctgaatcccgccacactctcagggtgcattgacatcattgtcatccgccagcccaatggaaacctccaatgctcccctttccacgtccgctttgggaagatgggggtcctgcgctcccgagagaaagtggtgagctctcagggcacggggacctggcaccggctctccttagagaatgcccttgtactctggtgatgccacctgtcttgaactctcagacccagagttttaggtcttcgttggaaatggccagtcacggaactgacagtgactaattgaaattattctagttagtatggctgtgtaaattaaagtgccgtggcacacaccactgtttattaagctcctgtatctgtgggtcaggaatttaggcagagcacagtggggtggtttgtctctgctctctggggcctcagctggaaagctcaaaggctgagggctggaatcatctgaacactcacgttctttgtgactggtggttgattctggctcttggctgggctcttcgctgaggctttggtcataccaactacccatggcctctccacgtggccagggcaccccacaacacagtggcagtggtgaggtgagcatcttgagagggaggaagacaggcagatgctggagcttatggcctagccttgcaagccacatggcgtcacgtctgctgtgctctactggttggggccatcacaagctgcctgggctcaaggggaggagaaataggcttttcttggtggtgtcaatggaagaaggataaagttcataaatttggagaggagaactaggttgctgcctgcagggtggccaattctgacaggctgggaagtgtagcctcctgccagaagcagaaacagacactttgaggaaggggcaaagagaccagggatttgtgctgtctggggtcacagaatctacatatttaataagccacaggagaggtcgtgagtgttcaggagaggaaaacatgcacacgtgcaactgagcttctgcctgtccatgggacccatgttcaaaacgtgatggcactagcaccagccaagggtggagttttctggtgtctaacatcaaagggtggagcagaggaagggaaaaccctcagggcacattctccctaggtgggccaggaccagttcctgggctcttatcaggcaaaaaacaaacacaaacaaacaaacaaacaaacaaacaaaaacgcagagcagcttcttttgttgataccagtgcacagtcttttgaaagggctggtttctgtttggcccttagggaggaaagcgtaatggtggttactgaggtggggtatgaggaagcctgtcctatctcccattccatcatggcctggaactcagttcttaaggtttctctggcatctccttgtcccagagggggtccgttcagtcagttgcgagcttagaattttatttctagtttattttcaggagtggcgaaggttctggaagagcaggtaggaccaggatattgatgtggctagttttagaagacaatctgccacacaaatggaaagaaacaaatccttgcaaatagacatttcatgcccccacctaatgtggattttgggatgatgtctcctgattggtcctttgagttaagttcaagaggaaactcttccttgagtatgtgtgaaggatcccagccaatagttgatgagttttccagggtgtaatttctaatgtctggggctggggaagctttgattgcagcttgaactctcaccagccatgtgaccctgggctggttactcctcttgtctggcctcagctcctcagccaaaaaaggaggagctagaccaggtggtctcggaggaatctttctattagcttgctgcaaaaataattgcagtttttgccattatttttaataattataataatggccaaaactgcagttatttttgcaccaacgtactgttttgggttccatctttcctggtcagggacctgccctcccgaacccagaactcctccagtcctcaagtgacagttcccttggatgggacggcctgactgagactgggagttgtgtggcacttcagggtgtatgcgatgatagcgtatctgtggagacttggccgtccccatgaggtctcctgtcctggtgaaggcagttcattcttttcttaaccatgttttcccttcaggttgacatagaaatcaatggggaatctgtggatttgcatatgaaattgggagataatggagaagcattttttgttcaagaaacagataatgatcaggtaaggaagcctgggtggtcagggttacttcctagttttgagctttgagtaatggttatctggaaacacggcagaagtttgtgcaaagtaataccggccgtggctgtgtggacgatggggcagagaaaagtgggcgttgatctgtgtgggggatttgagccagacggcctaggggtgtgctgagtccacacagactcagctctcctggctggcttcagtttgctgactgcttcccaggagacagagggatggacttcacacatgggcctggaccactgtcagaggtgtatagattacatcggtgtgtcaaatctcaaatgcccaatgttcttttatttagtgagtggctgaattactttaaaaaatattttaaaagctttattgagatatacatcacatatacacaatttacccatttcaagtgtacacgtagtggttttagtatatttacagataggtgcaactatcaccacagtcaaatttagaaccttttcatcaaccccaaaagaaacaccataccctttaggtatcgcctcccctatactccaccttccaactgctgagccctaagttaccactaaccttcctatctctatagatttccttattctgaacttttgaatggaattacagtatctggtcttttgtgcctgtttttttttgactaatgtttcaaggttcatccaggttttagtatgtatcaatattttattcctttttatggccgaatagtattccattgtatctatagaccatgtccattcatctgttctattcatcattacaaacaacttggggctgggcatggtggctcacgcctgtaatcccagcactttgggaggtcgaggtgggcggatcacgaggtcaggagatagagaccatcctggctaagacggtgaaaccccatccctactaaaaatacaaaaaattagctgggcgtggtggcgggtgcctgtagtcccagctactccggagactgaggcaggagaatggcgtgaacccgggaggcggagcttgcagtgagccgagatcgcgccactgcactccagcctgggtgtcagagcgaggctctgtctcaaaaaacaaaaaaaaagaaaccaaaaaaacccaaaaaaaaccaacttgggttgtttccaccttgtagccgttgtaaacaacatggctgtgaacatttgtatacaagtttttgtgtggacacgtgtgtttgatttttcttggttacatacctaggaatggcattgctgggccatgtggtaactttacatttaacatttgaggaactgccagactgtgttacaaagcagctgttccattttatattcctgccagcagtgcacaaagagttgtgatttgtctacatctttgccaatacttttctgattttgtgattctagtcattctagtgggtgtgaagtggtatctctttatggttatgatttgcattttcctaataaccagcggtatctgacatctttttatgtgcttattggccatttctgaatctttggagaaatgtctattcagatcctttgctagtttgtgtgtgtgtgtgtatgtgtgtgttgtttttcttttttactgctgccttgtatgccttcattatatattctagatacaagtcccttatcgggtatatgatttgtaaatattttctcccattgggtgggttctcttttcactttcttgatggtgttctttgcagcacaatagtttttagttttaatgaagtctaatttttttttttaaagtttgtgtttacctttttaatgtattctgttttttcttttgttgtgcatgcttttggtgtcatatgcataaagagtcctttgccaaatccaaggtcatgatttatggttatgttttctactaagacagaccacttccttaactcttttgttcacagatgaagcaccttaaaggggtctgatgtagggattcctgaatgaaatcgacttgaactagttcctttccaggaagacagctatgattaaaaaggaacggttctttatagctccaggttttaaagcaagtgtccataattgcagcttcgggacagaacagtcccaggcacagcctccatcctgcccgcccagaatggtggtgcctggggaggacccagcatctccccttccatgttctggagcaaccctgttgatactggggatccctgcatacctgctcttcacttctcttagatgggaagactccaaaaatactaattggttcctaatggcctttgacagaaactctttgcactgcatgtggacacctgcatttttaatttctatttgtacctggctttagatagatttttggccatcggagctgaggaagcattttgggccagcgtgcagcgggacctgtatgggggctgcttgctggtcttgctggcctgacagggtgcctgtgggtggggtggggccttggaggccagagtatgttcagctccatacagatgcctcttaggacccctgggatgctgctggaagctggagagcccgtgtccttcagcactgcttggtactgcatgtgcctgtgggggtctgcctggctgcccattcccttccagcccacggacagcaaagggcccttctctgctcttgatctgagaatctgtgctgcttctctagttgctccagtccagcagccgggtgagatgacctctcactcccttccagcctcagctgtgtgtctcaggtgtagacattctatttcagcatgtctgatgctctccaaacctatttgaatgatcagcagcacacgtttatttatcccctctgttttatgtatattcttattgtcaacgagtttctcatacaaaatgaggcattcattaataaaatgattactagagttttataaaaactgctgaatcattacaaacaactactaaatggacaggttgtgttttttccttttgtctttaaggagaggatcagtatctacttcctcgatgttcagggccctccttgggccctggtgcaggcaggttcttgggcggggctatcggttgttttacgtgtttttggtttttagatggttattatcttaattcattgcatataaaaaatacacaatacacattctctgtctttctctcacacccacccatgcacacccacatctacacagaagtgcaagagtgcatccaattcccagcataatatggtgagtcaaagcccatttttttcctctgtgctctgggtattacagccaaagttgaattttgggggcttgagatcactgagaattacctcccattgttaaaattacataaatgcaggattgagtacaaagtggcattcaatacattgttggctttctgatcttctaccagattgggcagccacatctccaggtcaccatggctgtggcctctagctgggccatctgctgtggccctccccaggaggtgcttggcctctgaagtgaatcctggaggcctctggcaaggccctgcttcttatacctgaattaacgaggctctttttagaaaatgtgttcttttcttaggaagttatccctatgcacctggccacctcccccatcctgtcagaaggagcttcgagaatggaatgccagctgaaaaggggctctgtggacaggatgagaggcctggaccccagcacgccagcccaagtgatcgctcccagcgagacgccgtcaagcagctctgtagtaaagaagagaagaaaaaggaggagaaagtcacagctggacagcctgaagagagatgacaacatgaacacatctgaggatgaggacatgttccccatcgagatgagctcggatgaggccatggagctgctggagagcagcaggtaataactgtccagggtggaggggctgtgccagaatcagacagttaactgttcaagattatttttatgaacttttcccccataattccttattcttttatgtgttttagaccagtggtccccaacctttttggcactagggaccagttttgtggaagacagtgtttccatggaccaggggtggatggttttaggaggactcaagcatattacatttattgtgctctttatttccattactattacattgtaatatataatgaaatacttatacaactcgccatcatgtagaatcagtgggagccctgagcttgttttcctgcaactagacggtcccatcttgggggtgatgggtgacagatcatcaggcattagattctcacaaggagtgcgcagcccagatccctcacatgtgcagttcacaacagggttcgtgctcctgtgagaatctgatgctgccactcatctggcaggaggaggagcttaggtggtaatgtgagggatggggagcgactgcaaacacagatgaagctttgccagcttgcccgccgctcacctcctgccatgtggcccagtttctaacaggggcatggaccccaggggttggggacccctattttaggctgaattttggaatcatgtggacccaatcctagagtggtataaagatttgctgtgctgtagccaagagacagttggtgatgccaaacctccttggctgatcgctttagcagcctggaatggagtcaagaaacaggaactgagcaaattaatagttcatgaccaaacccattttcttggaacctatttattcttatttgagcaccaacgatgcacaactgggctgatttataggcaagggctgatttcaggcttaaaagtgaatgaagaaaatgctgttttctctataagccaactttttcctttttaattttgacttaggtccaaagtttaatggaaattttgtttcctttttctttgcttttaacagtgtggtgaaattctgtttgtatgtattactattttggtgaaaaatgccagttttaaaagataaaattcattttgaaggatatttgatgtttcagatttttacataattcggtataatttttgataattttgttaacataaagaagggataaggggaatcaggagtatcttcctgtgtcattatttggaataaaatatatcttttttcgtggtgaaaaataaatgtcaactggcaacgaatattgcttttcccaactacagcctctatctaacctgtgacaggcttagaaccagcgtcattgggcttcttataattgccttctctgcatggctgttaagtacaaaatttagtggtaggtgttccaggtaacatcaacatatagacagatggcctctgcatgattgaaattgtgaattgtatttagtagtgagtgtgcttatacctgaaacgaggtcatttgcagttattctgtaatcgtaaggcatgtttggttgatgccatttatttcttctgctagacaaaatgtgatcagcgtatggtcattgagttattcagcagttctgcctgtacctggcaggggttttataccgccctggggccggtttggggccactctacctcccaggcttttggaacatgaccgtgtagggtagcaggaggtggcacgatgggaggatccagcagtgtgatcactgcatgtgtgtctgagtccaaatgctgaaacaaaatcattttacaattagaattcggccaaagcattagcacatagacacgtttatggatgccggtatctcactttttccccctccactgcctggaacagatctgggtgtttaaagagatcatgttaattacaaagcacttagagctaatcaagaaaaaattggaacttgattatgaatctatcattaagaattctttgactttaatctttttttttttcctccagaactcttcctaatgatatacctccattccaagatgatattcctgaggaaaacctctccctggctgtgatttaccctcagtcagcctcataccctaattcggatagagagtggtcacccactcccaggtaagctgttccctgttcccctggcccagtgcagaggcttagaagtcagtgataggaagcaattctaagaaaagaatgaaatagaaatgaaaagtgaaaataattaggaccaggaaaaacacggtgtagagtcggaggtacagattaggatcaaacacagaacatgttcagatcatacacttatatctggtgtcagaatccatctgcagatatggctgttagctccctggaggtgaacttgaaaggaaaaacatgtaaattacatcatgctaattgttaataggagaaaacacagtggcagagcctttcttgatacttagccctaagtaaaattcaaaaacagacgttgcttcaggagctgctgaggtcgttcagggctattagaatggtgcctccgccacacttaatccattctgccgaattcaagaatatttatttccctgaaatgaactcacaagttgccctagaggaaaacttggagaactagagctgctcactgtgcagatgccatcctgatgaccccagagatgtttacatcagtgaaacctctgggaatagtgagccccctggctagttttcaaaggacttggggaagagggtagagctaaatcctgtgttctcaacacaggaaataatataacccccattgggatgaaaattcattcttgggtggtgacaaaatcttagacgttataatggtttgtggtctctaaggggccacagcattaaaatctcatggtgggtggagttgggctattaatttctcagaatgctcaggggcatgttgataatgaaaaagagactgagaaacgctgatctaaatgccagtgacatccttgggttattcgtatacctcatgctttagattcgcttctggttcatggtgccagcccttagaaactctgggttcctacctgaagccggtcttatcaaaacgccacccctggttccagtttgatcagggtaaccttgtgaattagcaagcagcagtccccagtgtgtgctgacatggaggttggagagaaaatagatatgtcccatgcctggtttccagccaatactgatgtcgcgggttagtccagcaggctgaggctgaggcctgtgacaaagtccctgcatggaggtcttcctgcgtcagagcctagccctgttcaatagaaacgtaataactagctccatatgtaattttaagatttccagtagccctatttttaaaaagtaaaaaaaaaaaaaaaagatgaaattaattttaaagctatatttcatttgaccacagtatttccaaaatatcatttcaacaagcaatcaattttaaagaattattaatgagatacatcacatttctgtttacataccaagtctttataaactccattatgtatttcacatgcgcagaacatcccaatttggacaagccacgtttcaagtgctcaggagccacctgtagctggtggtttattatattggacagtgcagatataagacctttctagattctcattctttctctaggtctgtggagataaaatagtggagggaaaaatagtggtttaggaggaaaataatgtagaatatttagaacccaataatagatgaaaaaatctgttcaagcactgtatgttaattttaaggatttaaaagaaacactttaaacacaactctgagcgtgtttaatgctcaaaacatctgtaatgttttgcctcatgaatgcagcataatgactgagtcaggttatgtagctctgactatcaccaaatggaatgacaaattaggataaatagctacatttccacatttggaattaggtattttctgtaaagagacaattgacagcacacacgagcacatttttggattatgtagtttgattaagcacgaaagtgtgaccagagatgatcagttctacacatgggtgaaacagaaagtgaaataggtcatttggcagtttcctgcttttgtgtctcagaaaattcatgctgatttcttagcaatttcaatatccggtgctctgccattatcagatgtctgagtttctttattttcttaaaaatgtcgttgttgagagtagtcaaatactttacgtaatatatataatctttatataaagtatatatactttgtaattatatataatcttatatataatctttatataaagtatattatatatactttatataatcttatatatagtctttaaagtatattatatatactttatataatcttatatataatctttatataaagtatattacatatactttatataatctcacttgatgtaattgacctctgattttgtctttcttttaatgtgtatcacgtggtggtatccagtagcctggtagattgcaaaaggactgcccctcatcttgcagttgcggccgagggaggtctgtctagttcttgccctccacagtcttccctgttccatccttcggaaaggtagaggagttattttccccattgggatatattcaataatgaaaaatttgatctaactcttactataagtctattttaccattaaccaaattacttatgaagaaaatacctgtagattatatgaagtgaaaattttgatttaacttttacaaatcgatttcactaaccaaattacttatgaaaaatatgtatatagattactcttttcctttcgttataagcatttgtagatgatcagatttttttttttttttaattcctaaatttgactctctggaaattatggttaagcatataattttacctaattctgtgaagtgctttgaaaatgagaataatgaaatatagcttgggaatatgatcttctgttttctgtctcgggttgtttgacaaataagtttacaagatatttttggaataccactttaatttattataaacatttaagtagtttattgggctgtctgaataatggagtcagacactttccacagcatttctagaacagaatcttggagaatggcctgggctgggtctcaggctgaggatcaaaggttggtgtgttcactcgatgtagtcatctcagatttctgccttcattccctcagttttgacctacctactttgtggacttacatggtttactttgtaagccttagcaaatgaagctacgattaatttgtacgtggaaaaccttttgtctttttgattaaagatccagacctcaggatgtacttcattcagaggctacatttgcagaagaaaagtccgtttaaaatgaggaaaacaaagttgttaatagttaaaactaactagccttattgggactggcaaaaatactgaaaactttgataaggctaataaataccttgtttatgaacatcagtcattgaccttgtaagcttacttttttgaacaacccttgatcttaaaataataatatttcatgacggagcactttggagtcatctttctggtaaatcccacttggcagtgggccccattcctgcgtcctttttggtctgtctgaattccctcagtgacggtcggcagaaagcgcatctgtgtttgtgcacgagacctttggagaagggttgctgtggcctgaacgggcagcatttatggtggtggcctgtttgctgttggggagggacttgcagcagactttctcgtagggctgggctccttatgcgtgagttgcacgcctgagtgcctctatgggttttgtggctcgtggcttttatgaagggaccagaatgttaggaactctggagttgggaattgctgcaggagaaccgtgttccgcatttcgttcttctagagcagaggttggtaaagcacggcccatgggtcaaatctggtccaccatctgcctctgtcagactttcccgggcataggcagttggtttacatactggctgtggctgctttcacaccaccacagcagcgagtggttgcgacagacgtcgtaaaacccgtaaagcccgagatatctgccactgggctctttacagaaaatgtttgccgacccctgttcggagcaagctttgtctaaaggactttatttcatttagtgacagtgagataatttattgctgcaaagaacttatagccaaatatgttctattttgtctggtgaaacagaatggcaagagctttttagatactttgaggtttgggaacagcaccgttgagggtgagaagttggttttgatggacttattccatgatgatgctggagaaagagtggattgcggtcacacttgtaggtactgaggcccctcgctggaggccacagcctgcgcttttcccattgcagtgataccgaacacgtgactgtagacgcttcagtgccaccaaagcgttgtctctttggagaagtccagttgtggaactggaagagcaaggaggttgaaaggccaggagcctttcccacatggacgtgggggggcccacgtgccttcttataggactgctccctaaagggcagaaatgtgtgtctgttgggagcagggtgtcccattgcagaagctctcctaatgtgatgtcaggagcctcctctccccaggcaggcgaaagagagcgtgcaggctgccccgtggcagcacgtcattagaagggctgggagtcatgggcaccaagggagcagggaccaccctctgccccttggtgtgagatgagagagatggcacttggtctggctgctctatgcagcttgatcaaagagattcaggatcagtttagcccacaaggtccctgtttgttggatacaagttatgtatcatcatgaactcaccttgtattgacaggaaagttatattcaattggagttgaactctaggtaaatgagaccagaagcatcagtttccgaagaatagataaggtctgggaaagaagacggcaagggaaactgaaagctttatttcctgctttgtctgaaaaaccctgccgccttcctctagaggaaatgatgtgggaaaataagcaataattaaccatgttattatgcggcaataaataattacaagaattgctgctgtaaataatatttctctaagttgtttagaatatggtgaggatcttgtggataagttaatgacttttggatggttactttggctgggcagaagtaagaccttgtttgggtcttcagagtaaaaattcaggaaacatggaggtggttactgagcgagccttaaccagttggtgagtcccttgtgaagtattcctggaagacataagatcttagaaaatttcaacttgtaggctcctgcccaacgttatcgagtttatttgtggcatccagcatctttggtaaaattggcacatcatataatttccctgtttcccaggccagtgcagatgataaatatttaaaatatggactctaatgagtgcctgcccgagccaaccaagacccttttgcagccctctgacagcagaggaacttgatttggaaacagattgcaggagatgcgagtgcagagtggggtggggaagggtggtctttttgaggtaagaacagactatttttccctttctctttccatctctttcttttgtattctgggccacttctttttctcctctcccccgcggtgcaccaggcggcagggtggggcgggcgacccacgtggagcgccttccatgggaggcgcttccctgccccctggtggccggaggagggatttgtcatgaggctccgctcagagcgaacgacagctgggggtgcattttctgggctatttgagccatggagctgggcccaaaacatttacaaaagtttcttttcccaccttaattttcgctttgtgttttccttaagtccttccggttcccgaccttcaacacctaaaagtgattcagaattggtcagcaagtccacggaaaggacagggcagaagaacccagaaatgctttggctgtggggagagctgccgcaggctgctaaggtgagagtctcttcaattctgccacggaccgaagatttctaactcagcttaaattacatggaattagtatcatagcatagccaagaaacacagctaccaggagccagaggtaaaccaaaatatattaagggttagccttgaatgttggaattactttcttccacgttaccaacattatagagaggtctcattgcttttgtagattttaaacctatgggattcctcttaggatttacttttttttttttttcttgagacagagtctcactctgtcacccgggctggagggcaatggctctatcttggctcactgcaacctctgcctcccaggttcaagcgattctcctgcttcagcctcccgagtagctgggattacaggcgcatgccaccacgccccactaatttttgtatttttagtagagacggggtttcaccgtgttggccaggctggtcttgaactgctgacctcaagtgacccgcctgcctctgcctcccaaagtgctgggattataagcgtgagctgccgtgcccagccaggatctacattttctatcacagctaaatgcaaattaaattaaagaaatacaacttacacacaatcttgctgtcttgaaactgtaaacaaaaatagcttccagctcttgagtctgctaggtcattgatgagtggagcaaagccacagggagagagttgtggactcttggcccattgaaaaagaagctgagttgtaagagctggaatccacatgttcttgtgtccctcacacagagagacatctgggagagccctgggagagggaaaggctaatagaacagaaatgaaagatttcagcctaatagataaacaaagtcagaaaaccttaaggttttgattcatcaagtagtaagtatttctgggccctcattgttggtgggaccctgaatttgaccctatggagatctccaaaataaatagagaagcagctgagggtagcggagagaatgagggcctgggaggcagcaggttattctgggtttgagtcctcactgcaccgcttgctaaaaaggtgaccttgggcaaatgagtagacttccctgaacctcagtgtcttcatctgtaaaactgtgagaaaatgacagaattgttgtgaggttagaagggctaatgtaggtatgtgaagtatctggcacctgtaggccctctgaatatttgcattctttctccttggctgtggtacatgcacgctgagccccagtttccctatcttggatatgcagtgggtttacatgtaggtacataactggttcagcaaatatgtttctaaaaacatgaaatgaacacaatcttttctttcaagaaattttatttggtatgctaatgtattataagcatcttgaattatgttattatatcacaagctttaaaaaatattgtaaggtccttagaagatgctatagcctcttgcatccccaataaatgtttgtaatatgaatgaatgagtgagtgagtgagtgaatgactattgaaaacatcccttataaagagtcaagatgggcagctttttggagagtagtctgttgaggccaaagttgtggatccatttcctctctaggttatatttagatttcatagaaaatgctgatttacctgtccacagctatggtgctgacccagccaactctctttgcaagtttatgtcgttagttgctggagaaacagcatggaagtgcaaatccatcacttcttctggcaaaatagttgtaaccacagattttctgtagcattgtttttatttgcaattgaagctgtttgatcagatagagaagtgaatactttctcccctctttttagcccatgaattgcattttggtttttgtttgaataaatcttttctgtaactggaaatccctctggcggtagaatcagaaatgctaatttctcactcatgtgaaccaactgtcaccaaatctttacttattcactcatgttttgggaataaactttattgaaatatacatacagagaaatacacacattgtaaatgtatagctcaatacattttcacagcaggaacagatctgtgcagcgtgcacccagaccgagaagcagagcatgaccagcagcatggaaacccccactctttgcggtcactgctcagactgacccctctgctccctgcaaggggaaacttgatcttagcaacagagattagttttgcaagattcattcatgttgttggtgtagctgtaattcatttattctcatggccactgagaatcccagtgtgtgtgaaaagacttgtaatctaacagcatttagggtgctcctgcctgttggcattgctaatctcacttctctttggcagttgatgtttcacaggaaagttcatttgctttggacctaatattcttggtttctggactttttggcaggtatagaaatcaccaggtgattgttgaggcttaaaagtccctgcctacttttgattacttgttctccttgggtcactcagtttttctggttgcctttgtgctgaccttgtctctctctctgtccctctctcctctttgctctagtcttcttctccacacaagatgaaagagtccagcccattgagcagtagaaaaatttgtgataaaagtcactttcaggccattcacagcgaatcttcagacacttttagtgaccaatcgccaactctggtcggtggggcacttttggaccagaacaagcctcagacagaaatgcagtttgtgaatgaagaagacctggagaccttaggagcagcagcgccactcttgcccatgatcgaggagctcaaacccccctctgccagtgtagtccagacagcaaacaagacggattctccttccaggaaaagaggtaccaaggctggggcttcccggctctttttctgttcatagtttgtgctcactctacacatgacaggtcctttccaaagttccaaggaaactgaggtagaaactgaaccgtgacaatgatcatgttcagtctgagctcttcagcagaatatattaattatcggaatttagtcataggaaatcagacatgaagaaggccttgaggatcatgtagcaaacttcattttacacactgaggctgctcgctgagacctgggagagttaagtcctttccagcacaccatgggacccataagtgtgacttttataaagctgattattaggttaatcctggccacctctctccttgccctgcgttgctttccagccccttacccactgtaatttctgcatatcatttatcatgatttcaaatgatcattattttattgatttatttttgcctgactcccccatagaatatgtgctgtctgagatcaagagtcttttctatctaacttgcctttctctcctcggcgcttggcatagtggttggcacacagtgggcgctctgtgttggtttaatgcactcctggctgtgtgttagtatcaacgatgccaggcctgatctccatccacccagcagcttcgtgtggttttctagaattatatggaccaattacatcattttctgctagaagtaaagaggacatttgaagtcatcatggccagtgtctgacaatgcacagtgtgggatgctttgcctcggggtattgatggggaagtgcctaataaaagcttttatcatttcataataagtgtaataataatggtaatagcctcaatgcgtttagtgctcagtacacttcaggcactttacagaggaggaatgaggctcagcaagttaactaacttgatccaggccacacgatggtggatgacggccctggtttgtggaccttggtggtctacggtcacgttgtactgcccaccattttccaatgggaaaagcgcaggctgtggcctccagcgaggggcctcggtacctacaagtgtgacctcaatccactctttctccagcaacatcatggaataagtccatcaaaaccacctcaccctcaacggtactgtgcccaaacctcaaagtatttgtctaaaaagctcttgccattctgttttaccagacaaaatagaacacacttggaactgttgtggttcttgggcagtttgagtacctgggagcaaatctgcacatagtgtttaaatgctgtttctatagatacaaggccatgagctcatttctagaagagtggttttctgacttgagccatttgccgttttagataaacgaagccgacatcttggtgctgacggcgtctacttggatgacctcacagacatggatcctgaagtggcggccctgtattttcccaaaaagtaaaattcctgttaattcctcacatcatttcctataatctgaatatcattctgtgtgagaccagtttccccttatgtttgattagaaagtgtgcaagacagctgggcgcggtggctcacgcctgtaatcccagcactttgggaggctgaggtgggcggatcacttgaggtcaggagttcaagaccaccctggccaacatggtgaatcctcgttctactgaaaataccaaaattggctgcacgtgctggcatgcacctgtaatcccagctactcgggaggctgaggcaggagaattgcttgaatccaggaggcggaggttgcattgagctgagatcatgccactgcacaccagcctgggccacagagtgagactccatctcaaaaaaaaaaaaaaaaaaaaagtgtgagagagaggcagtgggaggctcccattgccttgtgaaatgcgcctgctctatggacataagggtgcgggtactgggcggcgccccacctctggacaggggcgcagcaccgggctgccctccctgcaaagcctgaggtcatgttgtccacagtggtcgtggtccacagcccagtaagtggcagctgtgcagcccttttttcccccaggagggtctcccgtgatcctggggacccaccctcagtccccctgcgatctagggcagggctggcgcctggaggggaagggcagggaacagggaggacagcttgcttcttcttcagtatattttagggggatacagggagatgcagccagctgagaagtaatggttttctctcctaagctaaggcgtttaatgtctctttccttgtcgtggtgctttaataaacatctgtgctgagatgcagccgtctgcggctctgagggtggccgcgtgccagagcatcactggatggtgatgtaggaccctgaactgggacagtcctcagccggtctctgccgcttttcctccttccagcggagatccttccggactcgcaaaacatgcaagcgacaacggagcccggtcagccaaccagtccccgcagtcggtgggcagctcgggcgtggacagtggcgtggagagcacctcggacgggctgagggacctcccttccatcgccatctccctctgcgggggcctcagcgaccaccgggagatcacgaaaggtaccgcgggcctcgcgcgggcgccctctggtggccgccggtcagaaggcgcagaggcttaggcttctccaaggagtgcgtgtcaaggcagcttttcccttggttgcggttaatgatagcacagatgatagcaccgaactcataatcccgatgtttctggcttgcagttagtcggcctcagagttctgtgggtcacccatggctcgggccatcgttgtgtgtctcctgtgccccaggctagcactgcagagatggcctccagaggcctgcaggctagagggggtgtcagtctaattaaattagagggtgtcggcagcgagagagaagtgcgccggcgccttggaacagggaggtctgagtttgtcggaggagggctgggaacttttcccagctggattcaaagggcgttaatcgggtgggcttaggtgattcattcacagcacctgccacattcgtagcaatgcactcccagggcctcctgacagttccatggcagggtgtgcccacgccccccagtgggtgcagtcagcagttatcagctggggactagacacagtggccctgcacccctcccgccccctctctcaccactgcctcttttccatcccctcgtggtatttctagcagggaaggggccgaggctgtgtacttcttccctctacctctcaggagccacccccatctccccttccaaccagggctgccatgtgagactcctgcctccaccctggtcccttcaaggctttgggaattttttcttccgcaaagattgagacctttttgttctcacgcccgtgccagccagtcccttgagagcggaaacaagattgtgtgctgggtcccgccggctccattcattcactcagttttcctagggccacacattaatacccagcctcactgtgtttctgaagtcatgggggctctctggacactggcgtgaggagtcccctgggcgttccctccctgatatacatgagctggtgggggtggggtggcagcactgacaaggctgggcaccgttatctgagtgttatctcatggggccaggatctgcagctgtccagtccttacaggtgaggccagatcgtcacagtcaggagaccccaggagagtccccggaggtcctgattagggctctgagggtgcatgttgaagccagtcaggctggcatcaagacccagggactcttttcctggacggaggagattctcagtgtctgatgtctgctgggtttcggttcggttcagggtaaataggagctcccagggaaggagtgggcgtggctctgggccagggagatggtcagaaccgcggtcaaggcttaaggtacagcccagctgccagagcccgtcaaagaactgagggtccggggctgaggtctgggcctcctgaccctgccaccttctcctttgctctgatcctggtggggctgccccaccatgatgagaacagtgccctgcctgcttctgattgtggtggaggcagccccatttttgaaagggccctgtgctttctatttacgacattatcagtccccatgaccaccctaggaagcagatgtggttattatccccatgctagaggagggaactggggcctgggaggtgaaccgcttgcccagggttacccccgtaatcgtgacttcagccgagggagcctggcttctgcgccatgcgtagccatgactctgcctgtgcagatgcacgtgtgtgctgttttcacccctactccctgtgtgaacgtatgtgcctcaactaaggtacacgtcccccaacatcctcagccttgccctggcctccctgcattgctgcacagacgccgccttccaggtaaaatggtgcggcctttacaaatacattttataggattgtctgcacagttggaatgcacaaactctcagaaaacacttgtgagtgagcaaatgaaaggtaggcctaattttgaactgaattttctttttgtttttccctgatcctctgcaattgctgtcacagatgcattcctggagcaagctgtgtcatatcaacagtttgtggacaaccccgctattatcgatgaccccaatctcgtggtaaagattgggagtaagtaagtacctcttgaaagtcactttggcagtagcatgatactgtttctgtttcatgttttcaaatagacctagacattaagccttagaaatatataaaataaagactttgctacattgcattattgcattatcttcactgtggtcagggttccatgccaatagaattggcaatatagctgataggttcagatagctctcagtcttgtgagttttcttttcttttctttttcttttttttttttttttttttgcgacaaggtgtagctctgtctcccaggctggagtgcagtggtgcagttgtagctcactgtagccttgaacttgtgggcttaagagatcttcccacctccgcctcgcaaagtgctgggatttcaggtgtgagccactacacccagctcgatgttcttattgaatgtgaatagtcacactctgcagtacatgggtatgtcagagtagcctacatctctacccttttgaaaaacttcattatcggctgggcgcagtggctggcgcctgtaaactcagcactttgggaggccaaggcaggcggatcatgaggtcaggagatcgagaccatcctggctaacacggtgaaaccccgtctctactaaagatacaaaaaattagctgggcgcggtggcgggcgcctgtagttccagctactcgggaggatgaggcaggagaatggcgtgaacctgggagtcggaagttgcagtgagccaagatagcgccactgcagtctggcctgggtgaaagagcaagactctgtctcaaaaaaaaaaaaaaagaaaagaaaaacttcattatctgagggcaagggatgtacaggtatttttgcagactgttagcaagcttttctcccttaagccatggatgttttacacctagttgcctttaccttgacacgtggcaagaaataccccaagcacgtcgtggtttggtgcagcagctgtacggtgggatttgggctgctggcatgtccaactgtctgccctgctggcacggctgctgctgggccctcaactggccgctggggtgaggtggggggagcctctgcctaggggtgatatggaggagggctgggggctagcaagagtattgagctctttaagggcctcgctggagtcccgagctttccttgactactttatatgacattggaaaggttttcagtctgagcctcggttttttgacatatatttcattgttttgtgttagatattataactggacaacagcagcacccctcctcctggcaatgcaggccttccagaaacctttgccaaaggtgagctttaacatgagaaagaaaaggggatgctagaaatgatgggtagcttaatctggggtggttggaatttcacttttattttggaaactacagagttaattccactgtgctcttttgaagttcatgagcatacaggccaggagtttctgatctctctcttgcaccttgcacgtggttgcccctcttccttatcaaggcaaaacctcccaatcatggtcgagcggaccgaagattcctttctcaatatctgccatgcaaggggtacaggtggaggctgagcagacaggtgccaggacctcagagcccagtgaggacaaagggagatgattgtcaccctggaaaggtggagcaggcatcagggtcaggtgcaggtgccctgtgtcaagtgtcaagtgtcagtgtcaagtgctgctcagccaggaagccagccccatgcctgagtctctgaggccagagccagtacagggcctggacagctcccagtctgcaggggagagtaggtaagtggccgtagggaggagttaggagggcagccacgccacctgccagtctgcagtgttctcatcctaccccaaacaattcactagacagtcagcctggagttgttaattttttcaatgatagatcttcctgctagattatacgttctttgctgcagagactgccttaggcttgtttgtatcctttgtgcgcttagcaagcttttgtatggcttaggatgttgccgtcggtcagccagttcaaacacttgagattcttgaaggtctaattggactttgttgagtctaggcttgctgcttcctgggtttgtgtgtgtgtgtgtgtgtgcctgtgcctgtgtgtcagtgtgtgctcatgtgcatgtgtgcatacgtgcatgtgtatgcatttgcatgcgtgtgtgtgcgcatgtatgtgtgtgcatgcgggtatgtgtgcatgcttgtgcaggtgtgtgccttatgtgtgtgcgtgtgtgtatgtgcatgtgtatatgtgtggatgtgcacgtgtgtgcatgtgtggatgtgcacgtgtgtgcgcgtgtgcatgtatgtgtggatgtgcacatgtgtgcgtgcatgtgtggatgtggatgtgcacgtgtgtgtgtgcgtgtgtgtgtgtgcatgtgttgtgttttgaggaccgcagtctcatcctgggtggtgctttatctgattatctttgtggactgggctgagggcatgttctccagagtggtttttattttgtccctgccatggtatccatggcctgggacacatttttatgtcaccgttctcaacacttacaaatccgtaagaaaaaaggccattgcaatagcaatatagctaaaggatttatttattcactgaagaagaaatccacatgggctctgaaacttaaaagacattagtccttgtgatatgcatgctaaatctttctacaagtcagtaacttttgactatatatggcatttctctaatatagaaattatttttaaatgtagaatttgcccatcttatcttttatggctgttgggttttgtatcacacataaaatggccctgcttccccatttccaaaacttgtgaagataggccctatattttctttttgtgctttcttgtatatggggcatatttttacaagttttggaaatttcgaaagatcttaaaatctttcatccatctagattttgtttcaagtgtaatgagaggtattaggaagcaaaccagtttttttctcaggaagttattgaattggtgaagatgatttttgttttaggaaacagaatgactaaaagtggcttaagtaatgatctcatatgatgaggatcttagaggttggcagtttcaggcttgatgaatttgggttagcttctttgtgattttctcagcttttccttgatggtcacaaggtgactgccgtacacatcgtctgctcagactgccgcatctgaaacgggagggtaggggcagctctctcatagttcaagacttggtcacatgatcaccactaaagcacttcttggcaaagcaatgaaatgactgtgaacggcttcgaccattgaggtgcatcctctggagttgagccagtcttctccgcatgcattgcagcctgattcttgaacagagtttcagatctgtcagcaagaaaggggaggcagatgagctgctcacagggtctgacatggctactgaattatcccaggaccgtgtattaactaaccctatcctccactcagaggcagttacaacttcaccctctgttacgtgtctctgtgaatttagatttatttctggacttcgttttctgttcctgtgatatgtgtccttgtataccaacactgcattcttttagttaccatatattttggtatattttaatacccagtagtgcttgttctacttactactcttctgcctgagaattttctgggctatttttgtttgtttttcaaatgaacattagaatcagtttgtgaaggactgaaaatactcctgtttgtttttttcctttctttggcctgctttctttttttaaaaaaaatgtggttttgttacatttatgagtggatttaggggaaatagggtcattcacagctttgtcaattgtcctatttatgagctggatgtgagtggtttgcattttagtgcagttgggttttcttttgtgtcagatagggatcttttaagctacatagtaaattacttatctgtctgcttcccttagactgaatctttcagcttaaatctttcttttgttactagctgaggtgtcagcttcttgaaagttctgtaaactgaggaagggacattacctaacttttaccttggtcctggaattaacctcaagatagataggtattttgttctttggaaaaacgtagaaaattatcaattcatatttaatctccccattaaacccatttacctaaaagtatgaattttctttttaatactcgagattttaaatcaaatgtacctattaatgcaaatgtttagaaatttacccttagtaaaaatcttatgcattttaccttttgttgaaaactgttttatcctctatcccatattaatcatttcatattttatttgataatcatcatattgagagtaatgatatcttaaccagttagccactttaatttgaaaacttccagtcttactaatcactaatgatttctaatgctttctttttttgttgttgttgttgtgttgtattttatttgttgtttgtttattcctttaacatcttcttaagtcttcatgcttaagttaccttcatgtaattttggacgccattaggttttgcttctctaaaatttttaacgcacaaatagtatgttgtgttttctctgatttttttttaaatcttactttaatttgcatgtatgtttcttttggtttgaatgtgctaagttgatctttttttgttccattatttatgttaccatccatttaaaacaggccactgtggaatctatcatgagggataaaatgcccaaaaagggaggaagatggtggttttcatggaggggaagaaacaccacaatcaaggaggtaagcccagaagacaaagcagtgctcacacttagcaagtgttggttttgtgtagtgagattggttttcatgtacttacatcagagaaatgaagataggccctagtgctgagtttccatgagccagctctgccatgaagtagggcgagtgctcgtggaacgtggggaaggtggggaggaaggtcaggagccagcagcataggtgtcacctcctggctctgtaactgttgggagactgtggtccagtcactccctcatggtaagatttcgtcatctataaaagaagggattcagcctgggaattcagtttcttaagaaattaaatatcttccttctgcttgtggagacaatttttctttttctttttctcccctcccctcccctcctttcttttttggagacgggcttgctcagtcacccaggctggagtgcagtggtgcaatctcagctccctgcaacctctgcctcccgggctcaagcaatcctcccatctcagcctctagaatagctgggattacagccatgcaccaccacgcacagctaagttttgtatttttagtggagacggggttttgccatgttgcccaggctggtctcaaactcctgggctcaagcgatctgcctgcctaggcctccgaaagtgttggcattacaggcgtgagccaccatgcccaggctgtgaggacaattttaatgaggcatactcacagcagttgactaattctctgagtcctttcactgaaatggcatgtctaaaggtccatggctttggcgttcatgtctatgagtgcctgtgatttctttcagatcttcgttgccctctcctctatttcttgaagcgcttgctttgcttggctcccaggcccctgtgtccacctgggtctcctcctcccagcaggctgctcctgctctggcttagtcacctctaggagggtcctcaaagctcatgttaggccaccttttctccttttacttcttacttttcccttctgcccatgcgatgactccatttttgtctccaaaccagacattcttttctactccacatccacttatcaagtagtcgactaagcagacatcgtcctgtggatgcctcaacgtatttcaaacttaacgcttccagaattgaactcatgggattcttgtgagttcttccatcattggggccatagtcagaaaatggcaccactgtccatctgtgggtgagattcatgcttttagcctcactcccacaccaggtcctatcagttttccatctgaaatacttctctgacgtgtccatgtctctccagctctgctcccacaaatctgcattaccatcatctctcccagaggtgcttccagatggtctctttgcacccatcctcacccttgcttcttcattctctgtactgcagatgcattggtctcttcaggggactgctcctatttttgttgctccttaaagccttactgtggttccccagggctcttataatgaaggcttgtgtccttaccacggcctacagtgcttgtgtgttctagctcctgcctgcctctttaatctcatctttgctgttctctgctctttgtgcattagcttcaatggctgaaggtaccttctaccctgggggctttgcacatgctattttcattacttagtattctgtggacccctctcccctgcttcgcttagctaactagcagatccagtagccctttccctgcagatgagtctggtctgctgtcctctgcctgtgaacttttccttcataaattttgtcatagttgataattatgtaattactagcgtgactatttgatgaacctctcctttctgtctagacccgaaacttcatgaggcagagaccatatatggctttgattgctttggtgttcttggtctccatattggacccagagtaggggttcagcaaatatttgttgagggcacgctgattactctgggaaagtagtatgaagaagccacagggacaacagtcaagttggttattttaatcataaactgccatgaactctatttatgccattagttgaaagggaaaatgtttgctggaagagttttatcaagatataattgttctttgacattttctgttagcatatctgaggtctactcatcagttttactaatctccaaaggttaccgataaatgagttcaaatatatatgctttacactagaggccttaaagcatgaagggcctctctggttttcttactagagagcagaatgttctagaatttaagatggaagtatatttcagtgacttctttgtagaatatccaaattctcaccagtttgcattaagtggagtgccgctataaagtaaggaacagttatgaaattaaatgtttctttaaaaatctgaaatatacttatttcagttagatacatatttgggaaatagtctaagaagaaattgctaatagtgatggctaagttacatgataaatagataaaacataactggacatattatatcaattatttgtgtggtaataaaaaaacctaaaggatatttgaacttagttcatgctagtcatatgttaagacagtcagcctattatatagtttgtattgttcattttctttattaaaggaccgtagatttcctctcctgacgaaacgagcacagagaaagagatttagtcgttcaccctcggtcccttggcatttctctctggtctcttctgtccttggggccagtgcccatctccgtcctcctttgcctgctatgtgcctggctttgtggttcagacacagtctcctttaatccccatggcagcgttaggagatggagaatttcacccgtttcacagatgaggaagcgaagttctgaatagttaaatgacttgcccaaagtttgtaagcaagagaaacaagactgggcccaggcattctcttagaaatccaaggttctttccagtacaccaacagaggattttctattaagagtatgtcatcttggaaaagaagaaaatgctttcacatcttccccaagcaaaatatggtacaaaaatattttcaagcgtttctatcagcaattacaagaaaatattttgaaaggcccccagaatccaagcagcccttgatcaagcatttgcataagctacagtgatgatggagtttggtttggtgccacaaacacttatggataacagattcgtttctgtcaaaaatatttcttggtttaatcgtacacttcttagcaaagttgagatcaggacccaccgaaacaaacacagccagagcctcctgggcgatcgctagggtgggcgtcattggggaatggtctatctttaggggtcctgccttaaggaagcccatgggaaaacaccggctgtctgcaagccccttctctgtggtacttctgtgactctttcttttcttcttttctaggaaagtaagccagagcagtgcttggctggcaaggcccatagcaccggagagcaaccgccgcagctcagcttggccaccaggtgcggtaggaggcttcttgggatgtttgcagcccctttccgcatccaagttcatggcgtgtgctgcctggatgcagatagggttcaccacacagttccaactctggctctgtgattcacttggtgacctggagcaatttatttaacttggttctcccatgagcaaaatgcatgcagttgctcccttagatagctaatttgcaaaataaatgtgagcctttagtgagataatataactagagcatttctcatggtcctggcatgcaatagtcctttatacacagatgatgatgatgacaataataacagtgagaataatgacagtgatgacaggaataaatagtagccctaacaataacatggaaataagtttcacttctgaaggaacttgcctttctctgtaatttaaatactgaccaggacttacgttgatacttttaacatggattcatattcacttggcataggagaggttagattttgatgatactgatccgtatttgtggtgttttgtcttcaggttaatcactttgtatgggattggaggtgactctgaggacagtcccgttatacactaattatgatggtggtatcatatactgacactgaatgatttgcgctgtaccatcttttacttcttacttcatgtttacagtattcctgtgcttaagaaatccaggattccatttcttatttagcagacagaaagtgctaacagattaattggggccagatccacatcttactcatttttgtatcttggaggccactgccccacagagtagtcgtttccaaagtgttgctcaaccgtcactgaaccactgaggttttctccatgtgttgttgatttatgggagaggcaggcgtggatttccattcctctgaatcccggccatggctctgtgtcttaaacaattttacatctaggattctttgctacaaacagaaacccacgtgggaggcaggtgggaaatgacctgatttctttattgttctctgtggagaagaacagggtggagacgagtgtgcgggacctggtaggggtgagtttgaatgtgactgtgaatggcctggctcgctctcgcctgggatgctcttgaaacctttctgtttcccctggtggtgtcccaggtgcctccccctgacccaccgctggtctgtgcttcacaggcacaagaaagaataggaaggcaccagggtatcgatatttcccagctgggaattctgagtttggctgtgagtgtgcttggaagggagaaggcaggtgtgttgaggatggagcccaggccaaggacatgccaccctctgagcagccagcatggaaagcagacatttcaaaataagtggttgtttactgcacaagctgtagcggaagcagtcgacattggagtcaggcaagtgtggtttggaatcccagctttgctcctcggtaaccattggaccttggggaagctccctgacacatctgagcaaaggtgccagtgccaccgtcagtgcccagacaggctgggatggagctggcctggaggctgcatgggaggcatgctaccccaaaagaggcacacacaacaaagatgcgaaactgcgtgctctcagcaacttaaaccaacttaaatagctacactagaaatgccccgctttcctggaattcattttaacaaccttctctgtcttggcaataatttctaaacacaagaggtagcacagagcaggatgtacagcagggaccttgtccaacagccttcagtgtgatctttggcaaattaatccacctctcagcgtctccatctgtgaaatggggttaagaataacaccgatgcggtagaccccgtctcactgggtcttcgaggcaacttcatgagaaaatgatccagagtgcagaaaccaattggggaggatggctctgtggtcacctggaggacatgcgttcaatcccaaaccatacagtttctgttggctgaatgcaggatgtctgccaaatccatcctgccctctggcagtgcccaaggctgtgggagcccacctcttacattagtgtgacctggatgtgagacatggagtcaaaggagatcattttggaacttttaaatttaatgactgccctattggatttcacacttgcatggggcttgtagccccttcgttttggccaatttgtcccaatggaaacaggtgtatttacccaatgcctgtaccccaattgtatctaggaagcaactcacttgcttttgattttactggctcataggcagaggggacctgtctcagatgagactttggactgtggattttgagttaatgctgaaatgagttaagactttgggggactgttgggaaggcatgtttgattttgaaatgtgaaaagacatgagatttgggagggtccaggggcagaatgatatgctttggctctgtgtccccatccaaatgtcactttgaactgtaatccccataatccccaggtgtcaagggtgggaccagttggagggaattgcatcatggggccgtttcccccatgccgctgttctcgtgatagggagttctcacgagatctgatggttttacaaacatctggcatttctccggcttgcactcactccgtcctgctgccctgtgaagaaggcacctgcttttcctttgccttcagccatgattgtaagtttcctgaggcctccccagccatgtggaactgtgagtcaattaatacctctttcctttataaattacccagtcttgggtatttcttcatagcagtgtgagaacggactaatacagccagtcttagacctaggggaagatgggcctgagggtcagagagttaggtttacaagggagggaagaggacagcaactgggaggggcccgtacacagtgggcacagtggcattgctggtgccagcactgctcttactcttactccttctagacatagcaggcaggaccccaggagagtgtggagagcagcgagatacttctgcagctcttcccacgttggaacctcagctcttgcagtttacttggggtgtcacggattttctcactgtccgatacaatcatattcaaatggggcaaaaaatgctttttcccatcaaatagaaacagctggaccattcgccattctgagttagtcacagtatggttccttatcaaacctgaaaaattaagaattgactcttgtgaaaactcagattttgaaaagaatataaagttctcttgaaaaatgtaaaccttttaatttatactggcatctcagactttgagtctccttattagagtcatgcagttgactaaaaaaaaaaaaaaggtgtcagaatgttttcctaattgacagacgtgattgacagaatagtccccgaagtcccataattgagcaaacagcttgtcaccatacaaataattaaaatagcgtttgaaaaacgtacactgacaagtgctaacttagatgttgttcacagctactcttctgtgcacacattttcaaatgacatgagcccttttgttttgttttgttgcttcttgcagatactgtaaagcaagcaacatttaatgagccattgtaaggggtggggtgggggcctccgaaaaggaggcattttattctgtgcagggtggcgcaatctgagacgtggcagccgcaaatgaccgtgtacttgccctaagccgaaaccaccaacagccaactgcgcatctcgcattttagtctttgtatctgtgttttcctttctgtgttccttcaaacatggcatgctgcacaaatttagtggattttttttttaaagcagcagatggaaatcacagctattccgccttgcctcctcatcccgccggcagaggtacacatcaatctgttgtcaccaagagctttgcttcacatttggatctcatttcactccaaactgtttggttggaacataaacattttcccattcaatgaggggcctgtagcctcgttcttcttctgcttgacaaggaaatctgcaccaccctcccctccccgttcccagcagcatttgccaggctgtaccagctccaggaccacatttaccccatctgaaaacctccagattgttggttcagaggaaccagcatggttcataggatccgtaggtgttagaactggaagggactttggttggatcaggtcattttacagatgagcccactgaggcccagggaggaatttcctaggatgaggcctttgctggggcttatgtctgggtctcccagtccaggtctctctagcctgttacctgcctccatcctgaagttttgggtggatgtgattcagttgttcctctgcattttaagataaagaaatcaaggctgaaagataaagaaatgatttctccaaggtaatgtagcccgaagttaccatgggctggaaacctgtgtttttcagagtctaactgctgtaccatctccactctacctagaatcaggatcagcccccaatgtcatggcgttgttccatccacgtgtagcttagctctgccacagaccaaccacagttctagccgatgctctgttttccttcaactcagcctcctgttcccatggcgtattcccccagggctctgtcccagtgatctctaaatctttgtcttcagcccaggtctctgtgttgtgatttagacacaagccctgcgtgagtgggaataggttgtttgctgtgccatcgatgcctggcatggtatgcttgagtgtcggttgaatgaactctgggccaccatcccaaagcccaccgacctccctttcctggggcccagggagcaggtgcttagggaggggctgctcattctaggactggaaggagctgggtctccacataagtgtggtagaaacaacacagaagtggaggtgctgtgggacactatcctccttcatgtctccccagtattgggcagtattgggttgtagggatctcttttttttcttttttgagacagggtcttactctgtcacccaggctggagtgcaatggcgcattcttggctcactgctaccttcgcctcccgggtccaagtgattcttttgcctcagcctcccaagtagctggactataggcaagaaccaccacgcctggctaatttttaaattttttgtagagacaggttttgccatgttggtgaggctggggatcacttcttaaatgaacacttatggggtcagaaagctgtaggttgcataggagatcttaagggaggcaggggcgggggaaacaggaggcagtaaggcgagaggaagttagcactgagaggagagagtttattgagataaaaagataaagacaatcctggtacttcttctcttatgaaattcagatcctttccccacttttaaatgggatgattggtttctctgctgttgagttgtttgagctccttgtatatatactgggtatcagcccctttttgaatgaggagtttgcacatatcttcttccatttaacgggttgtctcttcgctctgttgattgtttcctttgctgggcagtagctgttgagtgtgatatagtcccatttgctcaacatcactaatcaggaaagtgcaaatcaaaaccacagtgagatagcatctcaccccagttagcatggctattatcaaaaagacaaaaaataacgaatgctcacaaggatgtggatagaagggaactcttaaacactgttggtgggaatgtgaattagtacagctattatggaaaacagtatggagatttcttagaaaactaaaaatagaactagcatacaatccagcaatcccactactgcttatttatccaaaggaagggaaatcaggatgtcaaagggatacctgcatctccatgtttatcacagcactattcacaggagttgaaatatggaaccaacctaagtgtccatcaatggataaatgaatgaagaaaatgtgatatatacacaatggagtactattcagacataaaaaagaatgaatcctgtcatttgtggcaacgtgggtggaataggaggtcattatgttaagtgaaataagccaggcacagaaagacaaatatcacgtgttcttactcatatgtgggagctaaaaatattgatttcatggaggtagagagtagaatggtggttaccagagctgggaagggtagaggggagaggaggatgaagagaggttggttaatgggtacaaacatacagttagatgaaaggaataagttctagcgtttgatagcacagtagaatgattatagttaacggcaatttattataaatttcaaaatagttagaagagaagatttgaaatgttcccaacacaaagaaatgataactgtttggggtgatggatatgctaattaccctgatttgatcatggtatgcatgatattttgataaatgcaaatatatacgtttatcagaatattacatgcaccccataaatatgtataattaatatgtcaatagaaaaataaaaaatacgaaagacagtaaaaaaaaaataagctggagctctgtgtatactctaaccttgcctagaggaaggtgctgagccagaggctttgtaggaaggcaaagtaccggagggcttgggatgtgctgctttgggggccactcagccttttccatttagtctaaggcatttactaagtgattcatatagcattgaggcattttcaaagatagtggtcctgggaggcagagctgatactactgggttggggattatgtcatagcaggattttcattgagtgaatagctaattacagatatgcattatgtgagctatttaaagaaaacgagcctaattcccaccctgcacctcccagctccccactaaacaaaaaagtctagaagagttaggggcactgacctgtatattctgagcagggaagtaaggcgtattccttgctcatgggatgaccctctgggggatcctgagagaagaattggtgagtctttcttgctttcactggcacctgtccgtaagtcctagaaaggccctaattgcttggagttgtatatttggcgagctttatatagggaactgatggatgagtgtggacttgtagaaacttggactcctagcgcttggcatgcagtctcagataggaagagaagagagacagagaagacagcatcttcctaggccaagagggagtttaaccctgcttgtcatgagtaggaacctgttggcttaaaatagtggtggtagctcatcaataggcaagtgaatgaggagaggcagcccccacacgtgtaatgcaagagatgcatgaatggggatgtagtgagagttcattgataaatttaacgtcttatggtaaatgaccacccgagagacgggactcaggagagactggattgacttagtcattgattaaaggctaatgcatttttcatggctacccagatgcattttctaattggtgatgacatcactgtgtgttccagggtaaagcatgaatcatcctccagtgatgaggagcgcgcagctgccaagccatcaaacgcaggccacctccctcttctgcctaatgtcagctacaagaagactctccggctgacttccgagcagcttgtgagtctcccatgcttggcgcggctgtgttgtgagcacatgaggtttctgcagactcctaaggctgtgtgatggttgggatgtgcccgttacttgtcacctttcatcccagggggcctgcaatccctcaactgggtacccgctgtttccaccccaactccagcactatccaggctgggtccccaatatgaccttgccttttgtcttctccttttgctggcctggccctggaggatctagtttactagagttaggaggaaggcagcctggcggagctaattcgtcctaaggtgtcaatcacagatagacttgaaaatcactcaagggtgtttttgcttcaagagagagatgtttgttaactcaaatgcatctcttaagttggtggaaatcaagcagttgtgatagaatttagagaatttcaggtaaccaggggcatcacctggtcatggtgtccttttatttttctgtgtgtgagaccagttttaattaaaagccctttcttggatcccgttggtcatggccagtgagcacctgtccttgcttttttgtgaatcaagtcttgtgcatttctcctaagagttagtggggagcctggctcaagtgtgagggtgtttactaggaaaagataaggaagaggcccagacacccactcaggccatgtgtgggaccctgcagcctgggggtctctgtgtgactcactgctcccactggcgacactggggacacctgcagtcaggcagcctgggggtctgaatggccagctggtgtgcaccaggagtcctggcacagagactcaaaactgctcaaaagtcactttgtattttgaatttggtgtgatttctttgggtctagactatattcttctggatatgaggcatgactgataaccaagacttctctttttccaattcgtgtcagtataataataatttaaaaacatggttatttagggaaatgtattttcacacttggcttaaatttgtctccctgaatgatgatcttcctatttagtcctagagtggtaagtgtatcctattccaaacttgtgatttattacgccgtgtagccccgtcattgaatcctggctaatgactgtaatctgaaaatacttgatcaaattagcactatcctgggaagtagaacaactctgtagcaagtaggcaagttgcattacaagggggcctgagagagctgaggtttcattttgcctgtccagccccggaaagaaccagaacaaggaagggtggggaaagaaagaattatacaagggcccagggcagtcacttgtttttaaagccgaatcctgcttctcatagaacagaagccaaatgcccatcaatcagggcctttccctcaagcagacaaatactaatggttcatgtttttcagaaaagcttgaagttgaagaatggccccaacgacgtggttttcagtgtcaccacgcagtaccaaggcacgtgccgctgtgagggcaccatctatctgtggaactgggatgataaagtcatcatttctgatattgatgggacaattaccaggtaggtcctgctgacttggggcccatggtagatttctttgcttcaccgtgggggtctctgggcctggtgttggcacctctgctctcctcatgggacttgcacggttcgaattctggtgcagttggagctccttacgtagtttcagctccttggtggcaatcattgtgtttagggcttagttgtttccttctggggtattattatctcttcgacttggttgcttctgtgggggcttctcaagaacgtctttttgaatggcctttacctttgattgaacaagccggtcacctcgatgcatgatcagactggaggcgtccttctgtggattacctgtccctccgtcagcatcaactttgatgacttgagccttgggctttctatccagaaagaaagttgtgggtcttgtttgtgttttttttttttttttatgaggcatgaatggtgcaatgaatctgaaagggatttttactttatttttctcttttcctcttcatttagatcagatactcttggccacattttgcccacccttgggaaggattggacccatcagggcatcgctaagctgtaccataaagtgagccagtgagtacagagttcctgtttcccgcctcctgtgaacgctggtgtgtgcaccgcactctgcatatggaatctttcctgtcccagcacggggtgacttgcagagagggctgcacctcaaccagggaggggcagtgggggtcaggggtagcagtggagtccagagtgaaagtgaatcccagcaactccaaatttgaattcaataccaagaaacaaggggcgaagtataggggaattgattactaggagaacacagatggtggcagcattaggggtgagactgaggtttagttcatcccgagggatggcagaggtagccagttgaagaaataggagcttatatgttatatatgccaagtgattttctgtagactaaaaagttgcagattccaggcaagttttggcggcgttgcagaccctgcgagccaaccagcagggcacatcatgtctacctggtctgtggagtgctccagcaagtggcccaaaacagaacagtgcccaccgtgggaccctcagccccagacatcagatgggagaggggttctccgactgctctcctgtgctgggtacatgggttacttcacttatatcttacagagattctgaaaagcacataatatcatttctgtatttagatgagtgaaattaactaggagaactaaagtgatttatccaaattctcattgctctcgtctgcctccagggttcagagccctgcagggattctccatgccccgccccttccgaaacacccccattctagcttgccaggcccaagcctctctcccgctcagtcatgcctcctccagccttttgtggcctagagtctcccatgcgagtgaaatctccccctccacagcattctgttctccagccagttagagctggaaggtgcctctgcctgaatcaggacagtgcggtctctccgtgggtgaggtgggtgagcaagttacattcacacttagtgagtgtcaagatagtgtcaagacggaagtgtcaggcccatggttcccaaccttgtttgctcatctctagcccacagtggtgatggtagggaatgggccaccatccagagctgtttctagaactctgtgaacacagatgaatgaactgtatttccctgccctgcatccgttcatccatccagcattccttgagtgcctgttagtgcctcatcctagggcaggtgcctgggattgctatgaactaggtaagtctctgacctgggactttatgatccagtagaaaaatggcggcttggagagagaaccttaatcctggtgggattaaaagcttcagattttgttgggcacatgtcgatagtcccagctatttgggaggctgaggcgggaggattgcttgaacccaggagttcgaatccagcctgggcaacatagtgagattcccccccatctctctaaaaaaataagtatgtacattaaaaaagcttcagatgtcatcttagatgcccaagctcattggtttgactttacttttctagatttcatctttaaaaaattattaatacaaaagttatgcatacttcttaagacataaaaatactaataaaagaggctgagattatggaaacagtaaagcgcagaggttgtatcaccctcctgcctgcccttgctgcaagctattcccttccttaaaagtagaactactatgaacagtttggttctatcttgctgaatttcaaaaacttatttacatccccacacacatacactcacattatttaattattcatcatatcttttttgtttcattttatgtaatatttaccttactctttttgctactgggcagaatcctgtcgtctagatacaccatactttctttaactcgccctctattgatgaacgtgtaggtagttgccactttttcccctattgccaacagtgatgcagtaagcgttcatagacaatgcttatgatatataatgcatgtataaataaataaagaaggcacacacacttagggaagtcccgctgtaaagtagattcccaggagtagaattgctgggtcaaaggatgagcacatttaaagctttgatcaatattgccgaattgccctctcaaaaggttatcccagtctgtgctgctgtaggtggcgtatgtgcagcgtcgcctccccacagcctcaccacgggctgacctttcatttagaaggattaatctactcatgaggtgccttgacttgtgtgacactgaaaattgcatctatttttagttgaaggaaagaaaccctcatgggtcaggatgttgagtagtgcacagctgattcatttggtttttggaacataaatctatttctgtccttactgtaacattaaacaagccctgttgctttttaattttttttttttttttggtcttgatttgtctcttggttttctcagaagagagatcttcttgaaaaataaagctgtgtggcttactgaagaacccctgaccattcttttctttgattggttggtttagaatgagtgaaacctgtttgtctggacccgcagatactgcccggagcatgatgtgacgtggagacccaaacctttgcctgctcattgagttggatatgtgtgttgtccgcgcacccagtcaggcctgtgtgatttgcaggatggccagggcttctgaaaacccatcttcagggcagctttctacaaccttcagggctccctgctcagcactgtaggaggaggtgccagctccttgatgtggcatttgaaacctggcactttcaggtcccagtcttctgccaagcccttattttcagctgctgtttctcagcccttcctgctctaatccagcgactctgttcctcctctgcactccattcccttcttcctgcctttgctcatgtggcggcctcagcttgacatggcttcccctctgattttcgcttctccatatttttatagcctttaatgcctggctcaaatgccacagtcctcaggccacaatctgtgaccctagtcagctctggtctcttccccgtccccggacttgctggactctatgtggatatcggagggcttgggcctggcttgttggcctcggtccccatcatggaggacagtctggacacgatggcagcctccagagccaaccactgatgaaagtaattcccatcctagcaggctctctcaagcctcctcacacgagggccttagcagccaccactgggagacctgtcaggctaagaattgaccaaggcttgtgacccactgttctagtgactcccatcatacttttgaatctgtattgtgatttctagagaaacagagaaatgattctcatgctagggtaccagggaaaagatgccgtttacatgagggtttgtggactttttcctgattttgcttcccttaaatttgggtacgacttacattttatgcactgtagtatttgtctaatgaaaaagccaatcttcagctgggcacagtgactaacacgaatagtccgagcactttgggagtccgaggcaggtggatcacttgaggtcaggagtttgagaccagcctggccaacatgctgaaaccccatctctactaaaaatacaaaaattagccagggatggtggtgggtgcctgtaatcccagctgctcgggaggctgaggcagaattgcttgaaccctagaggcagaggttgcagtgagccgagatcgcaccattgcactccagcctgggtgacagagtgagacaccatctcaaaaaaaaaaaaaaaagagagagcgagagagagagaaaaagccaatcttgcagttagccacttgcctgaaacaacagtgaataaggacaattttgttttctgctgaatttaatgacttgtttggatctagtcagcccatgaggaatgatccataaggctaattgtcaccttgttcatagagagggtataaagctggcttgagtattgatgaaacagaacaaatgcaaatggaagatacaggaacccctttcagattcaggtgcattcaaaactagaaggaaagtcaagaaggactgttgcctaaaagatctagatcattcagctaatgggtcctttgaggcctaaatttgggcaataattgtttgaatttttgaccttatttcatacatgcttttatattcatgtaaccagaagccagtgtctttgtgacttagaaaaaagaacacttaccgtgtttcccgaggttcgttagctccgctggggtctaggtatgcggtgtcccaagccagtggactgaaaatgagaggcatctgtagcagacttgttagggtcttttttttttggagatggagttttgctcttgttgtccaggctggagtgcaatggcatgatcttggctcactgcaacctccgcctcccaggttcaagcgattctcctgcctcagcctcccaagtagctgggattacaggcatgtgccaccacgcccgggtaattttgtatttttagtagagatggggtttcaccctgttggccaggctggtttcgaactcctgacctcaggtgatccatccacctcagcctcccaaagtgtggggattacaggcgtgagccactgcgcccggcctagatcttttttcctttcctgcccgcagcagttatttctttcatgtcagcacttctttgtttattgcagtcattgccctctgccagtaagagataggatgatgcgagatgataagagataggatggaaggtctgatcaggagtcgggccaggatcccagaagcggcagccattagctcaccctgggccctgggaccgagtaccttccccactctgagctttgttttcctcttctgtaaaatgagattaggctagatgacccctgaggtcactgctaacccaggaatgctctgctcctggctgtgtggattgcacaagggtgtgttttgtttttccaagccaaacctcagtccaaactcagagggagcccctagactctggttgcaccaggagctgtcctaggtgccgtcgggggtgctgagcagtctctcccttcaagaagcttgtggtcttgtgggaggagacacttagggctccctgtaataaggcagtgaggggcagatcgagtgtgaaagatgttggtttttgttggacatacatcaggaagttaattttgattgaccagaggtgtcagaggaggcccctgtgagaaggtggcactcagctgagtctccatggaggagcagggtttcaaaggagaggaaagctcaccacaggtggaagtaggagcgagaggggaggctgggagacgagcaggtactgggtgggctcactgaaagggagactccggtgcagacggtggggtgggtaaaagatgaagcaggaaagtaggcaggagccaggttgcagagcgcctgggaggcaactcaccaagcctgagtggtgctgagccttcctttctcaaggtggcttgtgaccctctctccccttaggatggcagatggggccacagagtcctttttctctacagcagtggctctcaactgacggacatatggcagtgtccagagatgcttttgatggacataaaggggcatgctgttgactcttagtgggtggacccgggatggtgccgcatatctgatgaggtggcatcgtgggggcctcggtccccaacagacactcctccaatctcagatgtcagtgttgagaaactgcagtctagaagcttgcaaaatgctcccgaaggtaatctttccaaactatttaaatctccccgagtcagtgtcttaagagggatgcagagattaggcagaggagaaaacttgtaccaagcctgggcatggatccctcttttttttttccttcttcccattctggtgtttctccagagccctgttccagttgctgagaatgctagaggaacaggggtgatgtgtgtatcgcacctttatccactgacacctcctattcctgggtcccacctgtccttctgggtattgttggttttccccaagcaccctctgcttctgtggggcagggctgtgccatgccctgtgcgtaccccaagccccgtgtgcagcctggcataggagtgctcagtgagtgagtgtgcactgaagggaccgtggaaggagcctgtgggttgagcagggacttgggctgggctggcctgtgtggcatgtcctgccaccggttgtccttctgagtgaggggtcttccctgtgaggggcaccatggagacttagtgctgcctgagcatttggtggggcacttgttggcattgcagacagcttttgttgaaggcaggagggaaggctcttccaccagcagcaaacattttccccattaggtcactctcgagctggctttccagctaagtttagtcaggcaagaaggctggcatgctgacagtaactcagtggcatggcccaactgtgaaatatatttgacaatccagttctgagtgagattagcatcttagatctctgcaggtggcagcttttaggactttgatgtgaagagctatacatggaaatagtgatttctttttaaagattgtatgaattagatggctaaaatacaaagatatttagaaattaaaaagattggctgggcgcagaggctcaggcctgtaatcccagcactttgggaggccaaggcaggtggatcatgaggtcaagagatcgagaccatcctggccgacatgatgaaaccctgtctctactaaaaatacaaaaattagctgggcgtggtagtgcatgcctgtagtcccagctactcaggaggctgaggcaggagaatcgcttgaacccgggaggcggaggtagcagtgagctgagatcgtgccactgcactccagcctggtgacacagcgagactccgtctcaaaaaaaaagaaaaaaaaagaaatttttaattttgtttgattttcagatgcatccctgtattccagacaagctgatatttctagattctttttgtcttaaaactttctcatttcttagttttaaagaacatgttattgagcaattttcgaaacaaatccattggccattataaaatattcatggtagaacaatatgttggataggaagtgggtagtttattcactcattcagcaaatattcactaaatgtctgctacatgccaagcactgtttttggcacgggggttgtagcaaagaatgggacaaagtccctgtcctcatggagtttatggatgaatgagagatacagtcgaatgaaggactataacgtcatattagtgatcagtgctaggaggagagggaaggcagagcaagggccagtgcctgggtgaggagtgagggggtgtgtgtttcatcgcatgggggaggtcaagggaagggccttctggagaggtgagatccagcagagacctagatgaggtgagggtacaagcagtccctgcagactgggggaaaggtgctctaggcaggaggaacggcatgggcaagtgccagcgcagatgagcgtggcgagttggaggaaggatgggaacacctgtgtggtttgccaggagtgaggagttggacagtcattgcagatggggttggggttggagagaaaggtgggggccaggtcttgttggtcttataggccacagtgaagggtttggacgacgtctgtgagaggttgcagcctcaggagggctctgagtgtgagtgggctacgctttacattttcttagagcaccacgtggagtcgggatagcagcagggaggtcattcaagattgtcgcagcaacggaggccaggaggccatgcggtgtggacgtggtgggagcactgggtggtgccgagggtggagcagaggggacctgctgattgtgtggcgtgggggctgggggtaggtagacaccaacggggcccctgagggtttgacgtcacacctgggttaggagagtgccacttgctacttgcagtgccacttgcaacaggggcccccgaggagtctcggggtgagttggggaggagccgctgtggtgtgtgtggttttggaggtacccattttggagtgcgatgagtactgtggggtccacggtgagcacgtactgcgcagtgggtgtaatgtggagttcatagtagcctgcagcttgggagaggggtctggacggggtccatgcatttgggagatatcagtgtatagatagtgtttaaaatttttgaataatatgttttacttaatccaacatattcaaaatgatatcacttagacatgtaatcaatatgaaaacgattaatgaaatatatcataccttctttttttttaattaaaaagtaaactttaatgtcgaaaatgcaaacttggggaagacagaaaaggtcacacacagggctgtcacttcacacttggaaggttgcacagcggccgggcagaggtgctcctcactttccagacagggcggcgcatactttcttttttttataatagactttgaaacttggtatatattttatacttagagcacatttcattctagacactaaatttttgatagttaaaaaaagtgaaatggggccgggcgtggtggctcatgcctgtaatcccagcattttgggaggccgagacgggtggatcacctgaggtcaggagttcaggaccagcctggccaacatggtgaaactctgtctctataaaaaatacaaaaattagccggcgtggtggtgcatgtctgtaatcccagcaacttgggaggctgaggcaggagaattgcttgaacctgggaggcagaggttgcagtgcgccaagatcacgccactgcgctccatcctgggggacagagcaagactctgtctcgaaaacaaataaacaaaaaaaaaaagtgaaatggacctgctaacgcaataaagttgtgttcatagactagttgtttcttcagtctagatatggcatttggagctgtggaagtgggtgaggttcccaggtcctctagggagtgtggggggtgtggagaaatgaggcctgagaaccctgggcgcttgtgcgttttgaggctggcagagctgatgggagcaggcgagctgctgtgtctgggaagcggtggctgctgaggaggagaacacccggacactctggagtcctgggagctgagtgactcaggtgctctgggagaaggaatgagcccccgaggcagatgctactggggagtccattcctacaagaattgagagttgatacctgggtttggcaagatgggcatcagggtgacctgtgcagggacagcaaggaagggaacaagagaacaagagtctgctaggagtgtgaggagaggaaggaaagtgaagaagtggactcaatgcttgtagtcagctttttggaagaattttgctacaaaagggaacagagaaatggtatcttagccagagagagactaaggatgttttggtgtgtgtgcatgtgtgtgtgtgtgtgtgtgtgtgtgtgtgtgtgtgtggttgttttggcttggcttgttttaaggatgaaatgagagattgcagaatatttatgtgctgatgtgaattacccaaaagagaggaggaatttgatggggtgtgtgtaggggcgaatgaagcaaatgctggagcaaagtgtgtgaattggcaggtggctgtggtcttgtcgcaggggctctagccaagagctgggaccagggggagtacaaggggctcaagcgcaggcaggtgagccagtttcatccatctgaacctcagtttccatagcagtaaaaccaggggaaaatactcatccagccatgttctcctgaggattaaacaaagtggggaatgcaaaagcacttagtgaattacagtgaaatgtatttaagcctatttctcaattgcaagcaagattttgtagaatgtggacttttgtatgtgggggaacttgaaacagtgccattctccacagaacagatatggatcaggatttatgaatgcagaaaggttccattttctgatgccatgaaatgtgaatgttttatgtctttcaggaatggatataaatttctctactgttctgcccgtgccatcgggatggcggacatgacgcggggctacctgcactgggtcaacgagaggggcacggtgctgccccaggggcccctgctgctgagtcccagcagcctcttctctgccctgcacaggtaccaggcctgctccctgcacctccatctgtgagcctgttcagacccgctctcttcctaactgcaagttttgtaagaatagcctcctcactggtcttctgccccaatatccatgctccatagcaggcaccagaaaaatcattccaaacacaggtctacacctgcattggctcctcatggctttcaggccgagtccagactcaggagcttggcgcttggtggctcctcatggcctgcgcctcccctcctctccaggcgtgtttctctcgtctctacatctcagtctgtgtctcccagacaattgtctctgcttggagcctttgcacatgctgttccgtctttttgggtcactctcctgctccatctcttcttgagtggcctggctgaatcttaatgtccgttggacaatgagcctctatctcatctccttagggatccttaagtggcctgtctgcgaaccaccatcattcacctggcctttgacacccatcatacttgtcattttctgtcttagatttctgggaacactgttcattttacgggtcctctaacagaccactggccagtttctgattaccttcctcccttcacctatggggccatatcaaggtagctaagccagactaactctggccccttggagttggaggaagaaaacactggacgtccctgtagttggaggcccagggcaatttactagacacctctcaaagcaaaagctattgtggtcaaccataggacattggtccctgctgaaggctgattgtaaatatcataaacttggtctttatgaatgtcattgacgtgattctgcctgaatttgaagaccagatgaactgtttgctgctgctaatcatgcaaacagtggaagaatctagatgggccccaaatgctgtgttgattcttgtgtattttcctttagctctgtaggtaccttttccatcacggcgttgttttgtgtaagcagtagcttttttcctgtagtaaaagatgtcaaattgagacatgcacattctaggggagaaaagtcaggcacaacctagtgtatttcaagtcctcagagctatcataacagcactgatctcaatagaaatcctgatattttagtgaaattgtgtccctaagctatgctgacaatttgcaacaagccattcatcagcctgtgttaagtagtaaggctttgctaggccaagcaaaaagtccacatcgttactccgacatcctaacactaactatgcatttaaagtgatccttttcatttccttatttaaatatcattgtccaaggtgtattgctttttccctgggaggaattattttaaaaaccctaaatctcatagttgatatgtcctcttggaaggccaaggtgctccagtggcagatggccaccggcctggtccttcctagggctgccatcaagccagagccgttccatgtgctagctgtcctgtggagttctctagaattgctagcgaaggctgccctaacacaaatgaccttccttttttttttttttttttaattttactttaagttctgggatccatgtgcagaacatgcaggttttttacataggtatacatgtgccatagtggtttgctgcacccatcagcccgtcatccaggttttaagcccagcatgcattagttatttgtcctaatgctctccctccccttcccccccaaccccctgactggccctggtgtgtgatgttcccctccctgtgtccatgtgttctcattgttcaactcccacttatgagtgagaacatgcagtgtttggttttctgttcctctgttagttttctgagaatgatggcttccagcttcatccatgtccctgcaaaggacatgagctcattcttttttatggctgcatagtattccgtggtgtatatgtgccacattttccttatgcagtcttatcattgacgggcacacaaatgaccttccttagcacaactctttaactgggtgcagttctgattttactgctaggttttgaattaggatgaaggaggggaaggtagtgggtggatatgcgtgtggtgcagttggcaaaaacaagccctcagcacaggatggtgatcacttagcctttgtcaggagtgctgcgaatgtcttttcccagttcatagcttttaatgaaaataaacttagttttatgtcattgaatgtattgtttcctctgtagttgtgctttttgtgtattaccaaagtcttctctgacctgtgggcatgaagacagtcctcctggattttatctgaaggtgttgctttcacatttaggtctatagtccactaagaatggatttatttaggtagaatgaagtaggggtgcagtttaattttttttttcctatatggatattcatttgtccccacaccatgtgctaaaaagactgccctggctgggcgcagtggctcacgcctgtaatcccagcactttgggaggccaaggcaggtggatcacgaggtcaggagatggagaccatctggctaacacggtgaaaccctgtctgtactaaaaatacaaaaaattagccgggcatggtggcaggcacctgtagtgtagtcccagctacgcgggaggctgaggcaggagaattacatgaacccaggaggcggagcttgcagtgagccgagatagcgccactgcactccagccttggcaaccagcaagactctgtctcaaaaaaaaaaaaaaaaaaaaaaaaaaaaagactgccctgcccttgctgctccgagatgccattgtggtcataaagcaagtatctgtgaacgtgtggttctgttttggggctttctgttttgttccactggcaaaggcctggacgaattggccaaggccatagtgtcccagctcccacagctgcagaagctcctcaccttcccagcatcggaagtgctaggcctggctttctgctcgttttcgtagcttctagactcaaatttcatcaaaacacccaagactctgttatgagtttgattgaaattgcagtgaatctgtagagcaatttaggaagaattaatatctcaaaattatattggatcttccaattcaagagtatagtctattcttcatttgtttaggtctttcctaatatatttcagtaaagttttataattttagctgtaaaggtctggcacatcttctgttagatttatttctagacattttatattttaaaatttgatttaaaataccatttacacaattaccttttctgcttgtttctaatgcatgaaaatgatgcgattaatttttgtactttttttttttggtacattgacttgttaaccttattagagtctttttaattctggtaattcatgtgtaggttcatcttcttaatgtgcatatttgttttttgtgatgacaattttttcccctaattctttctagtatgtataacttttatttatttttcttacattattgcatttgataggacaggcaatacagcagtgaattgccatgatgatacagaccacccttatttcactgttaataagatgttcactgtaggtttttttagtattcccttctattcctggttggagttctcatctggattagatgttaaattgtatcaaatcctctttttaaatttaagtattttaaaaaatgaattttaatttgggaggtaactggtatcaaataccctttttgtatctattgagatgatcatgtttttctcttttaacctgataatgtgttatattgattttaaatattaaattactatttcattcctggaataaacccagcttttatacattgctacaatttgtatacacacatacacacacacacacacacacacacacgtgtatatatatattttagaatttttgcacgtatattcacaaatgagattggtccacactttgcccatactttctttttttaggttttgtttttaaggttatgctagcctcatcgaattaatttggagatgttcttttttgtttttatgctctgtcattctttgttccctggatgaccaggataacccttggtgaaatggctcatccttggtgttttcttttgtagaaagacttgaaagtacgggtttactttccatctcgtgcttttctgggatgtctcagctgcctgacacacactaaacttttgaagatttgagttttctcagtgttgcggcagctttgtcagctaaaaacagtttgatgctaaaggaagcttagcctctcatgttaatctgttatttatttgtttaacagagaagtgattgaaaagaagccagaaaagtttaaagtccagtgtttgacagacatcaaaaacctgtttttccccaacacagaacccttttatgctgcttttggaaaccgaccagctgtaagtagtagattgggtatagaagaacccttgaaatgactgccttttctggttgctgtcatctgaaagccctatccgagaaccatatgtagagtcagattctcatcccagaagcagtagcctggtgaagagccacttgcccacatctaaaggcaaggggattacaaattatcttatggcttccagggttctttgaaggttggcgggtgggtcaaagcttgagatatgggacttaaaactccaaatttcaaattactcattaaagcagtaaagcaagaacatttaatcggattagtttctttctaccagaagggaaccgcaaaatcagtcctaaccataatggcgaattcagcatctcacgttttaagtgtctagtgttgtctcgtatcatgaaagaagcgctttgagattttgcatgtattgcccgcatttactggaaagctaagtattctagagaatgtagttgggtactaactgctccatcagaaagtcctacttttgaaagttacgagagattttcatgaagtaggaatatgggtcaaagaataacctgaaggaatgttagaattgcggggacgtggtaggttgtcttttcttcaactcagtccttgaacagatgagggaattgaggcccagagagcaaaactaattgaatagtttcccatcaaaggatattctttcactgcaccactttgaggtagagctctggttaatgaaaatttgatatctcatcaaatcagaaataccatggacttgtttttacaatgaactcttttctaatgaacactttaaatcacctttaccaaatataggatgtgtattcatacaagcaagtaggagtgtctttgaatagaatatttaccgtcaaccctaaaggagagctggtacaggaacatgcaaagaccaacatctcttcgtgagtattgtacacattttatgtgattatgatatcagtactattatcttaaaacggtgcttcccagtttgcggtgtaccttttcccctttgctgcctatatgttaatctgtaattcttataatgaaaaaatgtattttaactccttgtattttgtccaaaacataatttttagacaactggaattaaatcagatcccttctgggtctaaaatttaaactcgtggttagagtctgctacagaatggaattgaatgaatttgaaaactagtagtttagatttgccaagttaggtttgaaagcctagaatgtgaatgagaaatataaccaaactgaaatatgtgaagttatatttaaagatgaggaactgtatatctcttcacataccaaatgtttcttaccagagacattgctgtgtaattgttaagaattcccttcatatttttggtcaaagcccagtttttctgagtcggtgggctaaatgggattactctttctaatgaggcatccttgtgtgcttagaatcactcttgactttatcctgtccccctcgggttcctaacttattaggatggagagcatttcctcattccatgttgttgggaggttggcccactgggtgacatcagcccaggccgacccttgtcttcctgccttgtccatttcagagactacacctcttctggtctggtctgtgcagacctggaaaagagcctctggcaggccaggcacggtggctcatgcctgtaatcccagcactttgggaggctgaggtgggtggatcacctgaggtcaggagttcgagaccagcctgaccaacatggagaaaccccgtctctcctaaaaatagaaaaattagccaggtgtggtggtgcatgcctgtaatcccagctactcaggaggctgagacaggagaatcacttgaactcgggaggcagaggttgctgtgagcccagatcgtgccattgcactccagcctgggcgacagagctagactctgtctcaaaaaacaaaagagcctctggccttagtggccccagatagcccgaggggttcctctttatctggaggagttagactgggggagtttggttctaggagattcctaaggattggttttctccatgtagcttctgtggttttagatagagagataagttctctctagggcagatttttactttcaagatggtccttaaactagttggattctaactgagtgtcaatagggcagttctaggctaacaggagtcctggggctgccccacaagactcctctcaccctgcagtcatgccagtacccaagcagtcctcaaggtttgtgcagagagaggggaggctggagccaaggccctgttccctcctgcagaaggcgaggcagtgccaggctgcttcctgattggcagaaaaacagcaggaacttgattcctttcttaacccttccttgcggtttctgccacctccactgttctaagtggctgactgtgacaatgtctcgttcccactcccctctcattccccaggctggagaggacctactgggtttctatttaggatctgtgttatagtctgttttcatgctgttaataaagacatggacccaaggctgggtaatttatacaggagaaaggatttaggctgggcacgatggctcatgcctataatcccagcactttgggaggccgaggtgggtggatcacctgaggtcaggagttcaagaccagcctgaccaacatggtgaaaccctgtctctactagaaatgccaaaaaaaaaaaaaaaaaaaaaaaattagccaggcatggcagcttgcacctgtaatccaactacttggaaggctaaggcagaagaatcacttgaacccaggagacggaggttgcagtgagccaagatcatgccactgccctccagcctgggtgacagagtgagactccatctaaaaaaaaaaaaattaaaaaaaaaaggggagacctcacaatcatggtcaaaggaggcaaggaggatcaagtcatgtcttacatggatggcagcaggcagaaagagagctcgtgcagggaaactcccccttataaaaccatcagatctcatgcgactttatcacagggacagcatgggaaagacctgcctccatgattcagttaacttccactgagtccctcccacaacacgtgggaattcaagatgagatttgggtggggacacagccaaaccatatcaggatcaaaaagaactttgaaccaatgagacgctgtccaggaatgggaaagtggcaggtcttgccatgcacgcatggaaagagggactccagcatctgagagggtttggctaggtggcctctgcggtcattgcattgactgaggctctagggttaaaatgcacacctcgcccatggcttggcctagggtggagctctgcagactttactcattgccaggggatgttgacattttacacctggactggaggcggggttgttcctgtgagagagtaaatctcctcccccaggaagctcacatttctctggcgctgaacttggtatagctatttctgagccaagtagatgcttgtcattcagaactgggacagtcatctgaaatgtcttcagaggctggggccacacagcgggagcagctcagttctttttccctttcgtttgcgagtgtctgtgcgtaagctctgcctgcttgggaggagcactgtgtgtggaggtcggtctgggggaggcgcgcagatggaactcggcctggccgctcagggagtgtgagagtgggtttggttccagtgcaccgcggccttgtagtcaagcctgcagggaggggccctgctgccgcagccacaaacctcagacaaataagccttaaagccgggaggtattttaaaaatctgtctgtttgtttgaatcccaaggaaagacataactcttggttttgtattaggagacgtcactttcccattttgtgcaagcacactgtttctcataagtcctttggaggtcctttattaaatatacacactcggcttcatttagtacattattttatacctcagaacatgcacacttctggagtctggattttggaagttcctttaggttcttagcaatttggaactagacagtgatcagtgactgtcaaggaggaatctggggatggctggcagtgggctgggtgtgccagaatctcagtttggaggtgcctggaggtctgaacatgcatattcaatatagcaatagcaactttcttttcatagtataagccacagaaactaacatgcaacatatttttgggcatgcaaataaaagagagcaagagaacgttgtaggaagcattgggaagccctgctctaattcagctccacagactataaagacgaagggctccaagagggcaagacaattgtccaaggttacagcaagcaggagagcccgggtctcttgaccgtcatgccaaccagggcttttttctctaagacgtgttgataatttgtcatttagatacatttgagcacccagtatacattattttaatgttgcatatgttattttatttaaattatccttaaaactgtggcatagtttttattttcctccctttacagtggaggaaattggcttagagaggttacgccatttgcccacgatcacgcagctagtaaatggcagagctgaacatcaaattaatgtctctttaaccccaggacccagctccttttcactatgcaatgaagcaatctctgtcaggtgctccaaagatgtgccttgtctgtgattcttcccccgatgtcccatatgtgacccctgcagcaggcgctatcccatggccatggtgacttcctcctgccgtcttttgcttggctgtatctcctttacctgtccttcaagtgaagtcaggtcccacccacctcttccccagagccttctctgatgccttgtttgcatactcttcattttcatctctcattttcaattaatcgataacaaattattctagaatgacttgagtcgtgtcgataagtaggcggtctgctccttgaggttgtagatctctcttgacttctacgtgcagccctgggtgcatagctggtatcgctcagtgccagtgacaatgtccctttccttccaggtatgtgagactctgtgaagtagtcgaccacgttttcccgttgctgaaaagaagccattcttcagactttccctgttcggataccttcagtaacttcaccttttggagagagccactgccaccttttgaaaaccaggacattcattctgcctcagcgtaaaatgtcccaagcagcctcttgccagcagtgcagagcctggttgtcacccattaaaggataggtctccccggagtgcacagctccacctgggagcctggcgcgtcatcattggcctgacagcagagagaattgagaagcatttctcccctgccccaccccggggctgacatttctaagcaagataggaagggagcactttctaggctaggagttgggtgcatttgtaccgtgaaaagcattcctcagttgtggcttaatgccagttacgacgctgcctttccggcctgctccagcaagtagctactggttcacgtgcagtttggggctgtgaaacctaggcagaaggcggctgtctgagggctgtccccgcctaggacagggtcaatcgaggaatgccagatgtgcacggtttttggcaaagtagggggcacatttccattatagcaatgttagtgccaccaccttctgaacacagtggggagggctgtgaaggctcatgtgacctggatctgaggtctctgatagaaatctggacgccaccgggtccaggcctggcctcagacttggccttgtggatgggccccttacagtatttgctgactagtctcatttttaggtgataaatttttctttaattcctttggttaaagatagtctatttcattggcatatctccccccagtttttgtggctcaaggctggaatatttatgccttaatatatctatggcagacatttaagaatgcgctttatctagctcatggtaactttgcaacgccttagattaaaatgacagtaaatattactaaggcagtattttgaatgagtttgacactgccggcttccttccatccagcgaggtggtgctgacagtgtggacttgagcacacttatgccaaatgataatgatactgacttctgttgggagctctccaaagaaactggttggttttaagaaaatagtttcaagaagttcaactatattcttttagatattatgtattgttttactctgattaggttactgtgataggcatttattcatattctttctataccactgtcattaatatattaaaaagatgtatgtgttagactatcgaaagggccttattctctctttctcatagactgaccttcttttggaatttctgagtcatttattttccttagctttttccactcaaattaagggcaagcgaaaaagtaataatttggcattctttaagcctacagaatgtgattctttcacttgtttattacactggctcgtggacagaacaatttgaaaagtgaaagaattattttggtaaaagattttgctttacttttcgaagcattatttttttaaagagtgttttactccaacgattgaaacattttcctatttaaatttcattgttagaatcacaggaggcaaaaaatggaacggttgaatgaaattttactctttctgtgaaagaaaatccacagagttgttgcctccgttgtagttggtgggccccgttagcattggatgcctttgccaaatggttcatgtggacacacaaaggcaaacagatctgccatcgatcgcagatttctgtagaaacacggatgtgcatgtgcagattcccttttgcaggtattaaaaataattaaaaatagtcctgcctgaggttgcagtgagccgagcttgcactactgcactccagcctgggtgacagagtaagactccatgtcaaaaaaaaaaaaaaaaaaaaaaaagtcctgccttaactaactcctctgcgcttgttcactagtaacctaaagaggctatattcattctttatgcaatgagggtatttttgagtgaattttaactgctctgaactaagtataagctcatgggcctgcaaaggttcagacggtttctcctttgcacccaggaggaactttggctgcgagaatggggggatgtatccctcatgcagttggcatccaggcagccctctgcagcagcacaccctgcaggcggagttttcagaggatgcaattttggatcccgaattttgatgtaccttaaacttccacatcactgcaccctgaaacagagcatgctttccagaaagtcacactctcagatctgtgtcaagttcaatgtgagccctggcaaggctggcatattaacacctgccttctggcttctgaaagtgagatttgtatatgggctgcactcacgcatatacgagttggtttatctttgtgtacatgactataacccagtgatgctgaggtcatgtgctggaatgctgtatttggaccacacatttcaaagttgccctatggaaatgaatcctacttagtgacaagtcatcaaatgtttgtcacatgtgatgaagacaaatatgtatacctggcatagagaaaaatatatacctggtacattggagaaaaataattacactttcaaagagaattccctttgcaattttatgtttggatcaccactgtaagcacactttatttgcatttgatctgtatttgtatatgctgatgcaatgataaaaatcactgtaatacttcattgtgttgtactggatgcaaagctagaaaatattgcaataaatgagaccgatgaaagacttctctgaaaatcaggtgtgtgaattttaaatagtttttggtaagttactaagttgttgacttttctggggtgtgttatcaagcatattctaaaaaaaatcttcaggctatgaattgttcactatttggaataaatgtttttcctgatgttttagatttaaatgggtaaaagaccagccttctctatgcacttgctggggacgggagggatgaagaaagagaggagaaggctgcacccgggatccctccctgccctggtgggatgattcaggagtagggaggtttcaatcaagtgaatttcatgaagtgcctcccagggcctggcctagaattggtgtttagcacatgggggttccccagcctcacagctgctgtcctcattttttcgactcttctctgtggtaaaccccagattcatttttcattttgaatgaatcaaaatccttgactagtgcaatcatataagctgaaaactgtcataattcctattgattttacatgtcaacgtggctggaagcttcctattgatttacctgcatcagcctaagcgtttttggaataaatggaaaagtattggccccctaaatgcaacatagccggccaggatactaggcccaattcctaatgaagcccaaatccaaacggttcatctctaggtgcctgtagaattaatgcttttgcatcttaaaaaacaaaaccttctaattttgttgaacaccatcacggatttgttccaactcggacttcagtgtgcgggctcttttatctataaaataaaaatttgtctagactattgtctttggcctgtggattcccacgtgctggcggagctctgcaggcagctctcacgtgtgcggggtaaacgagctcgggggcttggatttccccagcgtctcagctgtgatcacctgaatgtttaaaaggctttacagcttggttctcaaacactgacacatcagctctcttgcatcggaagccgaggaaggttgacgatggggccattgaccatcagcattggaccccagagtgctctttccaggaagagggaatgcacgtggccctactacagccctagaacagcggaactgtcctggaggaaagttaagtcggccccttcttaaaaaattaaaaagctggctcctaaaggctgggtgcgttggctcacgcctgtaatctcagcactttgggaggccaaggcaggtggatcatctgaggcccaggagtttgagaccggcctggccaacatggtgaaaccccatctctactaaaaaaaatacaaaaattagctgggcgtggtggcatgtccctgtgatcccagctactcaggaggctgaggcaggagaatcacttgaacccgggaggtggaggttgcagtgagctgagatcacaccactgtactccagcctgggcaacaagagtgaaactccgtctcaaaaacaaaacaacaaaactggctcttagaatagaaacttggtgtggcctaatctactgctccaggagaggtttgtc

SEQ ID NO: 340 - DNA, 739797 bp, Homo sapiens
  source 1..739797: mol_type = genomic DNA
aaaagaatcccactaaagtccatcctcagaagaaccactttttggagtttttatgaatcagtagctcatggtgtactctcaacagttatgaatggaattaggtcctgctagaggtcagggccaggtatggaaagatgaagggattagtcaggagacctggatgggaggaggggaagacaggtgcttggtcagtcagttgttttgtgttgggcgagtaacgtttcttaagtttttgtctgaggtgtaaaggggggactacgctctgtcctatctaactcacctgaagatgcaatagccgggtgagagactgctttcattatgtgctaacgtgagggattactttagatattaataggagagaagtgcaaggaaaggaagtctcagggtatggaatgctttcctggccatggctgctgcgcgtcataatcccctaacacagttaagtggtggttctcatcgtcgttcacccttacagatgtcagaggggaaagaaaaatccaactcaaaacttccaatgacaggcttgtctgtattcaaaccagttcatctcgttcgcagacttttttgaagctataagcacagagcaagctttctgggcggggctcagaagtaaacgttaaactccagggattcatttatttgagcacaggacagaggaagttgccctgaagcaactgattgtcattgatattcagggctcgctgtcaaccaggaccttccaggaactggctctgggccaagagcagtagaaatcactgggtggtccgcacagctcgcgggcatctaacctgcttcaaggctcagggctaaaagggagccagggcccttcctggaggcgggaacccaagtgggaggcagagcgcctgggcccgctcctcgatctgctgagtgacgaccctgtacaagtcatttctcttccgagagcttcagtttcctcacgtgccaagcggacgggttggaagttggtctttgccagctctgacaccttgtaagttttgagtcttgctgggaatccagggcggggctcacgaggaaaatcttggaaggggatttcatggctggatctcttccactcaagctcagtgccctaatttgacgccttaatagtagacgcaggcttttccattttccaggagccccctgacgcggccgcttcctcctacgtctccttcctcttcctctagcaggggcaaagtctccacatctccctctttctcttcctcctttgcaagctccctgcattcccgcgtctcctcctcttcctcccaggaaatgcaatgccctcagtgcgcccaccttttggcaaagccactgccggctgcgggtttcccctcccccgccaggcgagctctgcgcggcggcttcgcgggcacacgccttcccataccttacatggacaaatgcgtgcaggcaaagtcaggaattcaggcccctgacgtcagcctccagcgctcagggcaccgcacgggagaccaaggggagggggtggggacggtggggaggaaggagggggaaaggcaccaaccagcagccgctccagccctgccgaagtttcactttttgtctgtgggttcgttcccgggtcccgcgcgagctttcccgggataagtagctttagcgatcgggagacagccgggcgctgcaaggtaagggctggctgcacggcccggggcgcggggcgtggggcgctgggcgcgggcggcgcgctcgaggaggccagtgtggggcgcggggccgggcctgtccggggctggggacaatgggagggggagtgcccgggcacctcctcctctgcctctgcctccgcctccagccgccgccgccgccgccgccgccgccaccaccaccgccgctgccccggctgcctcctccctgaggtattgttgcaaatccttccttcccctcaccctccacccgcgggcgcctcgggaacccccagccctcccccggcgcgagcgcctccggggtggcaagagcgcagggcgcgcgccctgctctggcctggcccgctgtgcggaagtgccggccgcggcccaatcacggggtgcacgccatgggggagggggacccagagtttttccaaaagcgtcgaccccaggctaggcggggttggagccttgcgcgccccctgcccggacttttctgggcgcccagggggcggggccacgcccatccgcttagagctttcgcggaatcacagttgtcacagcggaaagggcctagacccagtcctccaagtcctcccattttacagttggggcagctgaggcccagagagaaggagggtcgcccggaagttatttactagaggccagaccataattcaaatagttggctccggacttaagttccctttctctaagcatttctctagcaccctgtgtgtggcagaccctgtgctgggtgtattggacgttgccctcaaggaactcagttgaacctgggagtcaaacctggcctagggtagaaaatgctaagtgctggagcaaaggcgtggacaaagttaaaggaagttccagggagggggtttgattttctggtccctgggacggccttttggagagtcctgcactgaatggggtttttggaggttgaggagtttcctgaagccagctagcggcttggaggaagacatctcttcgagggaaccgtgggccagagaagactaagtagtgtgggaaatggagatgaaagtataaatattctttagttggaggcaaggggttggggatgggggaggttgtgatatgagatgagctaatcagtggaattgtgcctgggtgcttggacagggcagagtctttggaacctcggagtcgtaggagaactgaaaaatctctctggcttcccttcccttagaagggatccactgctttccctcccccaacacaaaacaactagcgagaactcagggtcttctctggggcttttgctagtaccaaactcacttaactgtgtttccagtcccctttctctttccattccttccccttttactaaatctcttgcctttcctgtaaaattcactctcactaaggtgttgatgacttaatggcttacctttccctgcacatgtgcattttaagaaagcctaaagtgaagaaggggaaagtgtggctaggcacctttacaaagcatctagctccctctcccatcctcccccttcctcaactcttatagatagaagaataggtaaaggtccacgaaggtgggtgctagacctagagcctatggtcaataatggtggacagtggggggttaggacatccaatatggttttctccacttcgtcaccagtttttctgcttgcacagttcctgccagcaccagggggcagttaaaggaaaaagtgtgtgggccaggcacggtggctcacgcctgtaatcccagcactttgggaggccaaggcgggcggattgcctgagctcaggagttagaaaccagcctgggcaacatggcaaaaccctgtctctactaaaaatacaaaaaattagctgggtgtggtggcggggaactgtagtcccagctactcgggaggctgaggcaggagaatcgcttgaacccgggaggcagaggttgcagtgagttgagatcacaccactgcactctagcctgggcgacagagggagactgcctctcaaaaaaaacaaaaaacaacaacaacaaacaaaggagagtgtgcatttttgcatttaatttctacaatgcaggccccaaccccaacacccaaaactttatagtctagaatgtaggctccagaggggattacctattctgaatggtaggggtaaaagcctggggccttagggtctggcagtccccccagaggcaggctctctgtaagcagcatgggtctagagttggttttgagtgtacgcagagggaggagaagctgagctgatgagctgattgctgtggctgggacttgagtaggatctttcttagagtgacacattctggtgaagacagttccaggaaatgatggacgggagaggaaacttggttataaaggggcttaaaaatgccaggctaaggagtttggatatatcttaaattcatcatttgagggttttgagcaggctgagacatgatttagaggggaggtactggcatcgagaagccccctgctgcccaattccaatgagagaggtaataatttggcctaagaatattattggcttggcacgatggctcaagcctgtaatgccagcactttgggaggctcgaggcaggtggatcacctgaggtcaggagtttaagacagcctggccaacatcgtgaaaccccgtctctactaaaaatacaaaaattagccgggtgtggtggcatgtgcctgtagtagtaccagctgcttgggaggctgcggcaggagaatcacttgaacctgggaagaggaggttgcagtgagccgagattgcaccattgcactctagcctgggtgacagagtgagactccatttcctctgctgcgccccacccccccaagaaaaataatattatcaattggttcttgttcatttactcgacataggttactgaatacctattacgtaccattggcaaatatgaaaattttatagcagattcctgtattttattgagacaaatacgttgtatcgaatcaattgtaaaacacacttttttcacattttaatatcactgaaatgtggttgtcttattacaatgtaccatagttgtgcagttgtttttcatcctaagttggtaatggcacatcttatagttgatggcttaaatctgataaaattgttcatcatgtcgtttatgaatgtacagtgctttgcactttataaaacactttccaatcagatactccatttgaatctcaaaggtcccctgagaatgaggcctgctgctgctgtcacctttattttaacccttgcccaaggtcatatagctaattagggatgtgttcaaaattacaacccagaacttttgcttcttggtggtgacgtgtgactttaccctgctgttgagccagtctgggttaattgggaatggggcaagagttagatcggatttgatttcagaactatgctgaagatgctggatgatggggattttgtacacgggtagagtgtaactcataagaactgtgtagcccccttagcacagatatttgctgcattaagcagaaaaaagacagggagatagaaaatggcaggtagcaggtaaaacccggggttggagcctgcttacggtgaaccagaaactggcttggccctgagcgtacaaagatgaggtgtacatggtccctgcctttgaggagcacacaagtgtgtggtgtgtgtgagggggagggaaaaaggtggagtggggcatgtccgtgtattaagtgcttttacagggtaagttttggctgctcttcactgagaaggctcaccctcagggaaaccactatagagaggggggtgtctgagctgaacctctaggaatgagtaggagttgtccaggtggaagaaggacaggtgagagaaggacctattagcaagatagtagcagatgcagaagcagggagaagctgctttattctccaggctgtgttttgaaaggccagccatgaagaggaccatggaaaatggagaaagaagagggcctttactttttaataagtaaggtttaaattaatctcgataggggccgttaagtggttctgtagagattcacaggagaataaggctgggtagggtctctagcgtcatctctgtgggagtagttatttggatggtaatgcaggaggcatagtaccacttttagtctgagtgaacctgggactttgaccctgggccgcgattagaggatccaagctgagtatgttcattggtgggtgggacttttcctggaatctggctttggagggctgtgctttgctagaagaaacttagtagagtgaggaaggggaagatataatcatgttgatgcatgcaggaagctagtatctgggtgaaaatctgttggcttgagggaacatatgaggcggagaacctgagggcaaggggaagggtggaaggatttcaagtgtgttgtggaagtctgctgtaggctgcctggaggcttggagaaaaaggctggtgcattctaaatgttggtcacatcagtgagattggtaggtggataggtagctgtaggtagtgtagggattaatgtttggaagcaggtaaaccacagagttgaggctggaaaatgtttcctttcctatcattcttttttaatagtaatataattttgaaatattttcaaatgcttaccacctgttatgtaattatcatattgattcattaaagtaggttttttgattaccagtctcattttgcagatgagaaaatgaatttggtgaaataaggttacacaactaccaggaggcattcaaacttctgcctcattcttatagcctcttcaccactcttttctatgcccacatgcatgaaaagctcaaatcgacattgcttgtctgtgttcttccctggaatttaattcagcccacattcgtggggccctagtggggtcacaattgaggattcacatggacaaacgggcttctcagtcccacactggtgctgttctagcccctttttctctcttaagatgctaccttgggtgtcgtctctccccaaacctaactggaaaggactaagcctctctagcaaatcatctgcctctttcaacagagctcgcttccccagtcccttgttgtgttaagaatgtgatttattcttgtagagaggcagttagggtcataaagtaacagagtggggaagtgacagtcttgaactcagtcattacctttgatctcacggctccggtaacggtgctatatgttctctggtgctgaaccatatagcttctgcgtcctctaggaaagctttctggctcagggctctgagggaacacctacaatccttcctatcacctacctgagtcagatgggtcatctacattttggccactcacagataaaagcattaataatctgtttattgtgttgtgagaggagacagaccccaggatgttcagtagctgtttggtgaatgaacaatgtttatggacacaaataagcatgcatcaccacttcatcttacatatttgtgtgtctgcctcctctccactttaaaataagctgcttgaggattgcagtgatgtctgcttgttgatggctgtattcccaatgcccagaagaatgcctgacacatggtaggcactccagaaatacttgcttgatgaagagagggagtaaaatagttcactgcagccacaggatagcaatcatgggggagcgggactgtttttactgccccagaaccttgagccagttgttgctggcacaggtggcattgggcagtcctgccagcagagtgaagattgagggactgggagtgtagagctgagggttgtgagattaactatgccaaggttaattgcagttgcaactgctctttcacttttccctcacacagacaggtggtctggaacagtcctctgttttcttctcttttgagacagagtatttttttgtttgtttgtttggtttgtttgttttgagacacagtcacactttgtcacacaagctggagtgcagtggcgcaatcttggctcactgcaacctccaccccctgggttcaagtgattctcctgcctcagcctcccaagtagctgggattacaggtgcccgccaccactcccggctaatttttgtatttttaatagagacggagtttcaccatgttggccaggcggtcttgaactcctgacctcgtgatccacctgccttggtctcccaaagtgctgggattacaggcgtgagccaccacgctcagccttgagatggagttttactcttgttgcccaggctgtagtgcaatggcccgatctcggctcactgcaacctccgcctcccaggttccagcgattctcctacctcagcctcccaagtagctgggattacaggtgcctgctggcacgcctggctaatttttgtatttttgtggagatggggtttcaccatgttggccaggctggtcttgaactcctgacctcaggtgatccgctggccttggcctcccaaagtgctgggattacaggagtgaaccactgtgcccagccctctgttttcttaatccatgccttttcttatgctgttttctctacctggagtttccagcctttctgtctctgcctgttgtaaacctgtgattctaggatcaatatcaaaatctaccttgtgccatgaagcaatttccagactccttaacccttccaacccacacgtatctgtgatcagatacaactcaatttcatgtattgagttcggtacttgtgtacaaagtgattactgtatgccaggcagaaatgctagatactggttacaaagaaaactgagataggctctgccttccagagtcttccttctatcataggaaagaaactgaaagagaagatgctaaggctctaataaagtaatgagcaaagggctaatgggaacatggagaaaggagtgaccaatcatctagaagaactggtgaatgcctatggaaaagaagacatttggttgggttttgagaagtgaataggagtttacatggtggataggagtggaagagctttctagccatagggaccttggtgtatgtgcacaggcctgaggcctaaaagtatttgaggaatataaatgtgtgtttggagatcactgtgggagatggggctggctagggagggttagttgataaagagctgatgggccaagctaaggatgatggcagaggtgggagggagcaggaaggcttttattattattatattttgagcaaaggagggccttgttggatctgtatttcaaagagctctggtggcagactgagggcaggttaagaccagaggcagagtcccagcttagaaggctgctgaagtattccaggacaggagaaatgggcctgtatcgggtcagcagcgtacggagggaaaaatggattccagaaactgtttgctgctagaataatatcaggtagcttaattcctacttttgtccttctaattgtttgacagcttatccatcttggctggggaaaagaatttttttaatgtacaccaaagtttgtagtcaacaggagaagcagcaagctgccagccaagcatggactggggccttcttggccagagtgagctgatcccttgttatacagatgaggaaactgaggccccagaaaagggacagagctgctcaatcacacccttgtcagctgaagtggagttgggtcacagcctttactcctaggccagccctgtttccaggtatttttcattctcaatttctgctgtacctcacaccttccttccccactccaccctccactaggggtttctctgctttggagaattttaggagaggatgtaacttggaaattatggtatcttaggcttgaaacttgcgcttcatacttagaaagcaatcagattaagatggttcagtttgagtgtgtgtggtctggcgatttatttatgtaactgccatggatggctgccattgatgcttgtttgtgagaaccaagctatgcttccatgctaatatcaaggttccttgcttttgacagctccctgcccctgctctctaccattctccattaatatttacttatttttgcttgcctagaagtttttaggcaatagttttagatccattacaaggtagatcctcctgtgtttgtcttccctattgaacctgcccatcacaatgtatctcacagaaaccatgagtatttcatagccttcatagcacttttaatgtagcaaatacattttataatcatttgtattactttgttcccaaatataatgcaagagacaagttggctagatcagtcttatcttgcagatattggtcgggagttcaagggtcataaaactttcctaactggggtgcagggccttaagtggcagagtgagaatcaaacccccctctccaaaactcctgtcttgttccttaacttttgcaaatgagcatagttgatgtgaacatccctgcaagccctttacacaggtgagaagtagttattattatttcactagtactaattagtagcattaggtgactatattcaaggctttggaaggcaagactaaaaatcagatttgggacagggagttcaaagatctgggcttcaccataccggatcattttggcaatagtggtgatttttggtgtagggaaaacaaagacctatgtttgggctaaccacaagccctgtgatcttgaacaagttctggaacatccctgagcctaaattacctttcaatggagatcctgtgatctatcacaatgcatttgtgagaatcaggggcatttctgtgatggcgctttgtcagtggtaatgcagtctgtacatgtgtccgattctgggtgcccagcggggcatctggcacacagtgatgacaccttactgtgcttgtggggctgaaaggatttagacctagacaactcctagttcaagtcctcgttgtgctgtttaatacagggtgctcccttggtggtcacaggcactatttgttttctccacgtattcatttttagatctcttattaatgaggtcaccacagttgagtatagtgtgcccgcaaaagtgggatgagtgccacagacattcacgggcatttccaggttgtgcgctgatttgtcaccagtggatggctgtgcagtgtcccttcttccactgccaccatcccaccttctcttgggttttgtttgcactgtttgtatctgttacccgtggagggtctgcttctactgttgtaattgcttgtgttgtgactttgcatcatagctggagatccctctgtagttcaaatggaaagctggtgttgaaggtgaaaccaggtcttcttcagaaacttgtgtgggaacctttcatgggctggataagcatgaggatcaggacagggcagggtcactgaccttaaaggaggatgctttgacctgcctccagcatgcacccttcctgctgaagccattgttagtgtcccttaattactcaggccaccacccagcagcgcaactgtcaacttgcagaggacttcagtggtatcagtagtgttcctttttactctcataggtgtcctgattcggaggatacgttatatggtcaccctacttataggtgaatattgagtgaggtagtgtaaataatgtgcataaggccaggcataaggcaaggactcaacaaacatccactgtttttgttagagggggtgctaggtgctcaagaaatgtctgctgagtggccaggcatggtggctcacgcctgtagtcccagcactttgggagactgagttgggtggatcacgtgaggtcaggagtttgagaccagcctggtcaacatgatttaacctcgtctctactaaatatacaaaaaaaaaaaaaattagccaggtgtggtagtgggcgcctgtaatcccagctactcgggaggctgaggcaggagaatcgcttgaacccaggaggctgaggttgcagtgagccaggatggcaccactgcactccagcctgggcaatagagcaagactctgtctccaaaaaaaaaaaaaaaagtctgctgaataaactacatttatagaagtggaatttaagtttgtttgaagggtatgtcaagatcgtaagcacttactatttatgagggttgataaaatcatgttaatgtatatctataatataagagagtgccgtgggagaggcgcatgtgaaggactgatggacttgtgaattgctggagccttttggaagtgctgagccttcagttagacattgaaggatgggaaggcttagaccaggattcagcaggcagctgaattgctctggctactgagagttaaggaataagattggttctctgttcatgtgtgtactttagctgggtccctgaatctattattttccatccagtggcccatcttgataatgatctctagctgtaaccgtggaagcctaatgctctactaaactctgtgccaagaggtcacagtggaaattcatttccattatgcagagtcatctgcacttgtacttcctagtgaatttccactgaagatggttcttgtttagttcaaggaagaaaataacttggttggcacctggagcttctgtcttgtttggtatgaaaacgaatcattttcaggaagtgcaataaagagttgccacccacagggctgggtgtgccctgactcatgggaaaggcaaactctgccctggccaggcaggtaagtgacaccttttcttagaatgaggtgaaagataggtcagtgttccagtaggtggtcattgtcaccctggaagtctctcttcttggtcatagtttaatagctttacctggagaatatctagggttccagtagtgacagctggacaggaccctaaagataacattctttccataaatttgatacatttgtgtattcatttgacatcgtgtatcaggtgcatctgtgaaagaattagtgatatgttactctgggtttcgacgatggaaacgtgaatgcagtgtggtctctgcttgcaagaggtcacataaatcatcaagacagtatgtagaagtatatgcaaaaaatacctgaaggggctaggtgcagtagctcacattgtaatcccggtactttgggaggccgaggcaggaggatcacttgaggcccggagttcaagaccatcctgggtaatatagcaagatcccatctctaaaaaaataaaaataaaaaaattagccagtgtggtagtgcatgcctatagtcctagctgctcaagaggctgaggcgggaggatcccttgagctccagaatttgaggctgcagtgagctatgatcataccactgcactccagctggggttacagaatagactctgtctgtcaggaaaaaaaaaaaagtctgatggctctaattggatggtaactccctagggacctggggaaactcagataaagagattgtcatttgattgggcattgaagggtaagtgggaatttgtttggtgggatagaggatatttaagtgggagacataacatggatagagacatggaggtgagaaagtgcatggtgccttgaaaaattagagtcatgaaggtggactgcatagtagagaggctgtggagatgggttagggtctacattgagagaaacctttattgctgtactgagaagttgagactgcattctgaaaggagcattgagtagatcaatgagatgactggatctgtgccttaagaaaataatcagctatagtgtgctagacggattgaaggcaagggtgctagagacagcaggagctgtctgagctgctacaatagcccaggcaaatgataaagcaaaaccgaattagggttgaggcagtcgatatgagagatgactcacagatagaatagaagtcacagagtcttctcattttgcataaggggagactcagcacctaagaaaattacacgtgcaaagttcacagccctggtcccagcgtaacactgaggtgatctcgtctgcccagtgtcttagacgggtgacggaacatacggcttttgagagaactgcttgtcaaggaagatctccacccttttttatcttgtaaggattctgtgacatctcttaattctgaatgagatgagatggctctttctggagttactgaatctctaattgctggagatattcaagcagtgactgactgaactgttaccgtgaaagttcaggcattggttgaaaactcctctgcgaggtctttaagacctatcaaccctgatttttttttttcttctttcttcttcttctttctttttgttttttaaatttaattcctgggaaaagagacttataacagtcttatctgggaatgctttatccatttggctcctcaggattattttagacaaaaggcagagagagttaaaaatggatgattgagctctaagaatggtggcctgtagttcattcagagtagtgatggaacaaccatttcgttgccaataaattaatgctcactcatgtgggagatattggtagctggctcagcttgcaggatcctggtcaaaatggaccatccacatagcataatacttatcttgctgttgccatttcttatagggctttatggaaacatgtgttttcctacaaattacaggtaaatcataccagtagtcctgcggatggttattattattgtccaagtttaatcagaagcttgaacctgggaaaggttaaatgatttgcccagaacccaagcaagttaaacattgaaccaggacttaagttttctattatcgcaatgccagattcttcctgttccctgcctgtgcagatctctgagtccggctctagcttttgttcatattcatatccacagcatctgctgcaaatcctgggatgttataaataatttaataaatgtttattgaatgaacatatgaatgaatgaatgaatgaataatatatatgaagtaataaatgatgacttgagttttaagaatagcttaagaaattaaaaaaaccaccaccacctaattgagtaccttcttggcactttgacttttccttatagaggttacagtttttgtgtcttgcattacgtggttatcgctgagggatgtagtagaaactacatggatggtttggagagttagaaggtttggatttaaattatagctctgctaattgttagccatataatcgtgtactggttacttagcctctctgaacttccaattcctcatctctaaaagagtgtaatagtatctttcacataacatgattgtggaaggtattctatggtcagtgtagtaaagcctcaaagcctgccatgttggccgggcacggtggctcaggcctgtaatcctagcactttgggaggccgaggcgggcaggtcacctgaggtcaggagctcgagaccaacctagccaacaaagcaaaatgctgtctctactaaaaatacaaaaattagctgggcatggtggcatgtgcctttagtcccagctacttgggaagctgaggcagtagaattgcttgaacccaggaggcagaggttgcagtgagctgagattgtgccaccactgtactctagcctgggcaacggagcaagactccaccaccacaaaacaaaacaaaacaaaacaaaacaaaacaaaacaaaggcctgccatgcagtgccactgaaaaatgttatctttgtgtgtgtgttgtttttttttttttttaggattctctgtcaacccattagctaataatgcactcactgtatttttccttttatttctccaaattatgacctatggtagacccagtgtttgctgactggctaaatatgttttaagttctttcagagaagaattatagcacaaaagtcccaactatttctatgacttttcagatcagttgccagtcagcctccagaaagactattgacttgcacagtcattagcagtatgtgaatctacttgtttctctgtgcacttaccaggatttaattttataacttgcatttgtctttgctaaattaatatgtaagaaatatcttattattgttttaatttgaatttctttgattactaaaaaaatttcccaagtagtggtttattgtttgtgtttctctttatatggattgtcatatgacaatatttagaaatagtctgggctgaagacgcttgatataaaagggctaaaaatgtttaatgttttgagctgcttaaatttatttatttgtgcattcattcattctctcagtctttattgagctacctactccgtgccaggcacgtgctgcacatactatgaagaaaaaaataaatgaatgaaaacagtgacttccaacctcttcatttaacatgtgtgatagttgaagtctagaaaagtgaggttaattacccagggccgtacagcttgttcagtagcagagccaaccatttatttgaacagtaatgattttaaatgttttgtgtccatagccttttaaaccatggcgacatcctggaaatttcagtattgtgatgttaaagaacatctctaaactgtgtctacgttgaaaaatcagagtcctgatttttggtttagaaaacatggtcacctggttcttcagttgtaaatataattccttcctagacctctctaatgcttaagtctaaattcattcttaaatgaataaacttaatattaaaataagatcaggaagtaaatcccaagccaagcatttcagaccagttgtgaacctcttttgacatgtttttggtaaatgagaagaactgatgacatatttccctatcaaataaaatagacaatttagatttaataaggcagttatcttcaggtaataaaaattcaactaacttgccataactatcttgtttaaagtcaattaagagcctcatatttctcacttgctgggtaaaatttaatagaacttcagttaagcatttattgcttatttaattcaaaattaagttaatcaccacagttggtaacaaccactgagtatttaattaacattcagcaaactatcttattaagtctaaattagatacagacaagtcttgtttatccccatcagtttgcaaacaccacctcccccacctcccatcccaaggggcctttggttttcctacagttttccttttttgattcatcatttttattttcttctacttaagacttcacttgggtgaaagaggagaagaggcagcagtccatcatgttatagaaactttgggctcgtagtataactgagaaactttttcaatcttttcttttttcttcaatcctattctattaacatttcgtttttcaaaaggtattgagcacattctctgtgagaggcttcttttaaaccctaaggaagctataaaagaggtcattctgacatatttggttttattttctcatcctagaaatgagaggattgggtttagtttatccgtgtaacacgtattattggcttgcagtgtgtaaggcacttagctgagtgtttggatacaccttgattcagacaaggcccctgctcttaaagaggacacagaccagtgtgaaagctgcaaagttcagctgtaggaacatgaaggtcctttagaatgctgtgattctgtaagacagtatttcccaaagtgttaaggctgttttattaagaaaagggtcctgtagccaagtaagtttggaaaagtccaagttaaacaaaattaaggaaatttcagtattgtgtatctttaccatgggattttgagactttaataaacgaatgcgcattctgacctcccggaaggtttgtttcccaaagttatttgatcatagaacccctgcaccccactactaccctttgtaccagagcatttcctgggttcagtgatgtaatatgctttggggaaagctgctgtgggccgtggaccctggccacgaacctcccacagcccagaaggggtactcagacattcaccctagtaactatgatacagggtcagaattctactttgtctgaaagttgtgcacatagagtgggtgattttagacatagagtcttttaactggagtggagggtatgtaaccaggacagcctttcctcatggaggagcgctgggtctagcgggagatagactgtgtaggcagagaggcctggagggttgccagagcatcatcgggaacagaataacagtgaaattctgacatggctgatttggtggagactccctaacacattgatataatgtagaccaatttttattatagcctgaatatggagaggtaagaggcaatgaattttttggcgcagaactttctgccttcggctttgttccaactgcgtgactgcccatctgcagaagtgattgttgattcacgtctgtaagacattttcattctcatgctttgtttggggcagagcctctgccttgtgaatcactcttatgagagggagtctcagtttcttttcttttcttttctttttttttttttttttttgagagggagtctcgctctattgcccaggctggagtgcagtggtatgatttcggctgactgcaacctccgcctcccaggctcaagcaattccactgcctcagcctcctgagtagctgggattacaggtgtgtcccaccatgcccagctaatttttttgtatttttagtagagatggggtttcaccacgttggccaggctggtctcaaacttccaaccttgtgatctgcccgcctcgatctcacaaagtgctgagattacaggtgtgagccaccatgcccagccgagggagtctcagcttcttcatcaacagcatcattctagtcagtctagtttccgtttaccttgtcatctaccacttcctccaacttaccttccccccagcttctcttattctggtgaatcacctgtgtcttcatttttcattcttattcatctgaatcatcttcttcatctaaggcaaggtacccttttatatcttcctggaaagacatctacttcatttaaaataatgctaccaatttcctcccctctggtagcaaccagcagatggaacatgctagatgaggtagaggataatctacaaatctggtctgccatatcatgggagatttcacgtaacagtgaattctttcagagcctctcagcaataccttccttgtttttcatatctgtatcaaaaggaacactggcaaacctgggttgtatttctcattccattttgggcttgaatttttctgagtctgagtctcagtttatctgtgtatgaaacgttagggttacgctatgtgtactctcagggccttttaactagaaaatgttgaatttgaatgtttactaagtcaacacaagctgcagtcaccctggattgcttgatcctccatgtacttttgagcctggcagtatgaggaaactcctgcagtgagcatagttcatgcctacacaaagtaggcattccatgaatattggttctcttccatcctgactgcttctggattcattttctttttattgccattgctttttagtcacccaagcttatctctttcttgtctacaccctcaatgctgtaaatcttcctttctcattctccatctggatagcttcctctctcctcacctttttcccttcaggctatgcctatggatgctgtccactctgaaacctcccaaagacaaatgattgcaatggaggcacagattgccgggtggtggtcctggccagctacaaatctttccaagagattagcaccatttctttatggaatcatattgttgttccatgagtgagaccaagtcttatcctcaaggatcccataatggaggtgagatgctttctttttgacacttagtggaaacaacagtccatgaggtatattatcaattggaaaggtggggtttttgctttctaggattgggcaatgcactactaggttctcagcgtggattcttgagtatctaggaaaactggtcatgtggaaagcttaagcttattttgcaggccttgaaaagacagcctgcatgtttcatttcactctctacccgaactgacacttcagggatgaaaatgtcagcagacagccagcaagtagccgactagagggcatgatgtgggctggtggtgcaactcttcaaggatgatatgccagagagggcagaacacagttaggacaaggccaaggatgtcattcccatgtggagaggccattggtaacctcggcgaggtttggttcttctccagtagagattttcagaagctaagaattcaccttgagagtcctttttgcttcctcttcttttgtattaaacaaactactcacctctcagtctttgcctttagtcctttggctattcctggttagataggcccaattccagaagcatctggaaaactctgctctaagtatgtagtgcttaagggccagagctctggagctacactgcctggatttgcattctggcctgccaaaaatacctcaacttgttgctcagtatttttaggcctctgttgcctcatccataaaataataataagaaaattacttatcttgttgtgaggattaaatgagttaatacatataaagcccttagaacagagcctgacatgtgataagtgcccattaaatattagccactgttattatgtgttacccttattaagtcacaaaatggcgatttggaaaagataatagagattatctaaatgattgtgttttttttgttattgttgtctttttaaataaacttttaattttggagtaattttaggttgatagaaaagtaaaaattgtacagggaattttcatatactactcacccacttgtcctcatttttgatgtcttacattactatggaacgtttgtcaaaactaagaaactgatgttggtacattactgtgaactaaactccaaactatttagatttcaccagcttttccactaagttcctctttctgttccaagatctagtccaggatacccagtttaggatcattttaaaactttcatcttctttaatatttatttacttatttttttgagacaaggtcttgctctgtcccctaggctggggtcccccacttgtgtgatcatagctcactgcagctttgaccttctgggttcaagcaatcctcccacctcagcctctggggtagctgggacaacaggtgcatgccaccacacccagataaatttttgtattttttgtagcgacagggtctcactgtgttgcccaggctggtttcaaacccttgggctctagccatcctcctgcctcagccttttaaactgctgggattacaggtgtaagccaccacgcctggcccatattccttaatatttagagaaggattccttatagaaaagcctattacaggtcaggcgcggtggctcatgcctgtaatcccagcactttgggaggctgaggcaggcagatcacctgaggtcaggagttcgaggccagcgtggctaacatggagaaagcccatctctatttaaaaaaatacaaaaattagccgggtgtggtggctcacgcctgtagtaccagctactcaggaggctgaggaaggaaaatcacttgaacctgagaggcagaggttgcagtgagctgagattgtgccattgtactccagcctgggcaacagagtgactccgtctcaaaaaaaacaaaaacaaaaaaaacaaacaaaaaaaaccaacctgggcagcagagtgactccatctcaaaaaaaaagtaagaaagaaaagcctactatgacgtataatgttgtaatcatgtaatctggagcagctgcggatgaagtcgagcaggatgggacccacctttttttcttcccctgatttatctccctgaagggctccagcaaagcagggcttaaaagtcactgcattgagtctccttgttcttaggggaagagactgaggcccccaaaagtgaagtgacaatgctgggagaagctggaagcccagagaagatcagaaaaggatcttcaagataccttgatcctgtccttgttgaataaatgagtgagcaactatcggggactcccaaaaattagggtttggatccaggctcctccacctttcccctcatttttccttatctgtaaagtgggttcactgatcagtaatgtctcataggacttaaccctcacaaaatgccacagttttaccctgtgaaagttaagcaaaccgttgtgcccacttttagcacagcctggaacgtagtaggttctcaatcaatgtttgaaaaagaagccttgaaaatcaggaaattctccccttagaacttatttcaagaagattgggacaagctggtgcaaaacaaagaagagttattcatgaggaaatctgtgacactcaggaatggaaccagtgtttgagtatctgataagcaggatatactgtctgtttttattcttggaggcttttatcatacaatactacattatgttacagtctgactttcacacaaattggatcccaaaacttcttacaggaattaaaaatacaaactcgtgggcagtatgtgttttataaattacagaaaacagtagtgtaaagacatggcatagcaagtgcagcgaagcgtgcgcaggcattgatacccgaggaacgcacgcatgaggcagcagggaaggcacagcatgctgggtgaggcagcaggtgcacagttctgtccctggagcctggagagatgggggaggagggacatctctagctgggaggctgggtgaaggagctgaaccctggagacataaataccctgtatatcttccttatcctgccatttatggtcttattgaagggggccagctgacttctgaaacctcatctccattgctttccctcactcttgtctttgttgcagcactttctgcatttggattaccctgccctgccatcattacctgtttgaatccaattgatcttcaaggtccagcatattaataccacctcttccatgaagcatgccttgatttctgcccatcccccctaagcaggaaatcatcacttcctcttatggttccatggccctttgtctgtactgcttgcatggcactgatcacttcttaccttctcttgtagttatcaatatgctcgtcttattttgggcttttacttctttaggaccttctcgtctgcctggaacttggcaaacagtgaacatttgttggatggatggacaggtttgacactgctgacactagactcaaatttagtttctttagagtagaattttattttattttatattttttgagtcagagtctcgctctgtcgctcagcctggagtgcagtcgtgggttcttggctcactgcaactccacctcctgggttcaggcgattctcctacctcagcctcccaagtagctgggattacaggtgcctcccaccatgcctggctagttttctttgtatttttagtagagatgacattttgccatgttgcccaggctggtgtgaaacccctgacctcaagtgagccgcctgcttggcctcccaaagtgctgggattacaggcgtgagccaccacgccccacctagagtagaattttaacttgcttatctttacatctcccatgctggcactgagaaggtgcacattcattcatttcacaataaagtttcaggcactatttcagcagtaaacagtccatttgttgatagttaacacagagaaaatagtactcattgggatgtgtttttatacttgtaaggtcgatctggatttgtttgtttgttttgatatgtaaggaccaagaaagaaaaggtttgctaatctacgagtatttctggtgtagaatgcaaatgctctcttattccttcaactggctttatactaaaaagagatcactgggctcagaaaggtcctatttttcagataatacagcagttccttactgacttgcctcaggagtaaactccttttccaatttttaaaaggatagtaccaggatgccactgtgctcatagttgggcttttttgtacatgttaatttttttttttttaaatatagtgacagaatgcataccactgaggtggtaaatggaaaaaataagtgcagtggagtatactgtctgtttcttggggccttttctattaatcacaggaggaagcatcagacatgaccagatgagagagccagatgacccaagttcatgccagatcaaaatcagaatggcaaaattgggaggagttgatgctgttgaattgagaaagcataaggttctcagagtgatagagctggaaggatcataaaggtcatctagtctaatggttctcaaactcgaaggaacattagggtcatcctggagagtttactgggccccgtctcagaggttctgatgctgtaaatcaggcgggacccctgaattttcatttctaagaagctcacaggtgctactaatgttgaagagaacctatgatctagttcaacttctgggatttcttgctttctttcttttgtaaaaaaaataaataaataaatttaaaaaagagtttttgaagatggggaaatgaggcctggaaatagaaaagatttgcctagagtcacacacactgtcaggtcaggtagagtcaaaatcaggcaccccgactcacagactgcttcacattgccatcagagattgtcctgcaacaatattatgtttagttctactgcagaatgataactggatcttaccccctttgcctgatctggccacaaacttgtttttcaggtctttccattaggctctcttcagctaattaaaaaaaaaaaaatcagttaacccacatttattgaccagtgctgtgtgttcacaactgtatttagactagtggtatagcagtgcagtagtctgaaaacattttctcatctgtaaacaaagacagtcatacctcctaggactgcaagaagtcactgaacatatacctggcccttagtgtacacattactaaagagaataagatgtggtctgcaccctctcatgcaccagtggcttcttgagcagtatgatagagagagacagctgagatttagtggaaaaacacaaggcttagaattgggagagctgggttcaagccccagctttgccactaaatggctgtgtagtcttgaacaagtcacctgccctctctgagctataatttgaaatagacttagcttaagcaacaggaaagcagtaatgagctagaggaaggatagaaattgggaagaagtataaatctgcttaggagatggcaagtttggggctgaggtggaattgatctgagggagagacctggtagaaagagctaggcagtatgaggctgagtgtctgaaggggtagcaggcctgggggtggtccagtgatggttgaatgggtgggccagcccagcgaggggatcgcctgcaatccagtagagatgccctcattttcatggcagggtccccctgtgccagtagacagacccaggcctgggaaggagggctggttgaagtgagatggataccagtcttggagcatggttggagaatctgtccagggtgatggcatctgttttggattggggccttgaggcacattttcagttctgctccctggaccagcataggagggtggcagacagtacagtgatttgaatacaggattgatcctgccaccttgatttctgcctttatttagcggcaaagacactagatcagaaaagtactggatgtgattgctgtagtctttcatgattgatttaggagctgggagaggcctggctaggagttggaggatccctgggaagatgaagattaggtcttacgtgagcctcagccctctcctctgtaaaatgggagtaatgatggtaattatgctgatgttacctattctgactggagtaaggattaaagtacttgtctggaggaaggcacttcatggttaaaacatgaaaagagaagtgcacagtgtttttattacagggaaacaccaaagagctggaaaggaatgagggctggagagatggagctgccctgaggactctgggaggtcatcctgggggcagaactttgacagttgctgcccgaggtgggacagggatgctgggaagatgtgacgatgtgcataagtgtgtcatgttcaagatggttctaagccctggccaattccatacatgctcttttcctttctcatccatagaggttttggcaaaggcatacttgggagtgttgatatagctgacactgcagcaccctcagtttacaggtgtgagaagagtgaggctcccacagtctcacttggacaggtagtcagggctctgatggagctcctggagtttctaggttctctgtcacttgatagtcagtgctgggagggacctcagggaatcagccaatttcacagatggggagagtgaggcaggttgggaattctggccccagtggagggcaccacatgcccacagggaaatgtctttcccagccccctcctcatgcttctcctcttttctgtctggaagtcctagttctcctcctcacgctgagacccaggtagggtgattgtccatgtttcttcatttatctgttttttttctgttgcccagggactactctaagcaccatgctggttgctgactgttcgcttttgcaagatcttggaatctctgtttgttcacatcacaactcaagaggatacgttctcattctcccaatgtttgtcttctgcccattgcatcaaattgctcttccttgtttggaattaaacttctagcaatcatttacctttatggttctcttaacttcaggtcacactgttgtttagtcaatgtgagaatctttcagatgttctgcactttgcaaaaggatattcacagccaatgtgtgcggcagtgaaggacacttgttgattccttatttattgtctgctgttccagggaccggggactagaggtgaataaagccttgtttgggctgtctaggatgttgtgatcgacacaggaaacagacatgaaagccaaattggcgcagtgggtgaagtattgtaatactggtctctgtttatgatatatggaagaagtttcctagtagcagggtgggtgagagagtccatcatcattgcagattggtgcctctgtggacatgcaggtatattaggccagaggtggggagtgggagagagagggagagagagagcacgacaaagagagagagagagagtgagcaagagagagggagggagagagacagagagagagagagagagagagagagagtgagcaagagagagggagggagagagacagagagagagagagagagagaggttttgagagcattgatatggggtctacatattccccccggcccccattccctattatcatagaagcatgctgccctccaaggcttttgaatttgccaccgtgaagagcatgcatggaatcttcggctgtggccttgcattgccccctgtcttcgcagcggagcttctttatctgacccgtgcatgtgcctctgatgagcagcccttcatcacagctctgcggcctcctcctaggcccccgccttcagctctccagttcatttcccgccttgttcccattgccacctgcgggcttggagggccacctgacattctgtcctttgggtcccctgtgactccagagctccttcccttctggggcgcccacatctgcgacacgcttgtttgcccagtgcattttctacacttagagttcctctcgtgctctcatatttccatttaaagccctctcgagaggtctgtctcctgccagcagcattccttctagtttactagaactccatttctcatcctgccaggaatccagccgtggagtgagcttcagcaagcctctctgcagtctcttgtctgctccaaaactgtggcctctggttgtgagaaatgggcatcctgagtcagtgagagcagtagttagcttgcagcagcttcccctctccccctgagtgagcctttcttcctcttcctcctctttcattcagcctcatcctgccttgggtccatttgacagataatggcaccttgaggccttgtcttttgcatggcatctgtgcctgactggtcagaaattacttgtgaagcaacatagggggttgttggttgggtccacttttaggatgaagtcagaagggatcgtgagtgatgcttggccaataagaatgtattgatttgatttactaattaatttcatttccagacaccaatatatgcatagccttgtttgaagaaaattaaggagaaccattttgtaaatggcaatgagtgtaagacacttaactatcttcctgctctccctggcgtgggcttccgcgctccctgactctgcttttatttaaggtgtctgggaaggcatttgtccttcggcttcccagctggcttcttgccttctcactcactgcctcccgtagcctgtgggcagaatccctcaccgtgcccaccttgccctgctctcgtctgacctcacctctgtttccaggatttgctatggctgtcccctgccagtcatgctctgtgcttgctactctgagtgtgtccctggtcccactctcttgcagcctctgtgtcttagcacatgctgccctgatggcccaagggcccttcccctttgtttctgtctggggaatgttctgtctcctctttcttgaacctccttatattccctcaagaagacttaaggcaaaaacaaacctgaacttactatgtgtggtatttttgtgttataagtgtaggacctagtcatagtaacacatttcaaaaatatggaaccgtataaagaaaatgagcatcactcataaatcactatttagacacaagcattgtttacgtttctaatattctttctttagtggtgcttttcatgattttatgtgcatttgcattttactgactaaatattactatataaacattttcatatcttgccacttcacctaacaatacagcacaagcagcttctcatggcattaagaattgtttgtacatgtaattttgaatggctgtatgctgtttcatcttaagaatataccataattctaatttttcatcattataaatagcactgtgacgaacatccttcttaacaaaattctttgtctgcacctatgattattttctaaggtagattattagaatttgaaatgccttgcacaaaggacagtaactttttcacccttagtttcagagagaacatgttgtctctggagaaacacagaaacatgaaaaagcacaaagaagaaaataggcctggcacggtggctcatgcctgtaatctcagcacttttggaggccgaggtgggcggatcacgaggtcagggattcgagaccagcctggccaatatggtgaaaccccgtctctactaaaaatacaaaaactagctggacttggtagcgcatgcctgtaatcccagctactcaggaggctgagacaggagaattgcttgaatccgggaggcagaggttgcagtgagctgagattgtatcactgcactccagcctgggtgacaaagtgaaattccgtctcaaaaaaaaaaaaaaaaaagaagaagaaaataaaaaccacctgcagtcatttgcaacagccagtgtgaaatttgctacataattgtatctgtgtatctatctttctaccctacaggttgccaaacattttctgtaaaggactgggtagtaaatattttaggccttgcaggccatacatggtctctgtctcctcctcctcttgtttccgctgctgcttcaagattcttttaactatagaaaaattatttctcgctagtaagctgtataaatatcagttttcccacctggttctagcctcaaaagtggagcaattctgtacatactttgaaagcaatgtttaaaaatttatttaatttaattaattaaaaaattaattggttactttttagagacagggtcactctctgttgctcaggctggagcacagtggcatgagcatagctcactgcagccttggaaatcctgggctcaatcaattcttctgcctcagcctcccaagtagttgggactacaggtgcacgccactgcacctggccatgtacatactgttttgtaattgttctcttccacaatttaactacttcatcagcgtcctcatagttttctgttttaggcaacccagatataattactggctttctgctgggatgcccacagcactttggccagatctctgatatagaatttaaggcacattttattgcgagtatttgctgagatgtctctttcttaagtctaactcctcgtgagtctttccagcctcagcacatttcctgagtggtgcttaatagatgctcagcaaatctgtgtggaacgattgccttaggctgcaagtttatcccttcacaatgcctacatttagattgcaactccaggcttgctccttgggccagcagcatcagtatcacttagcacttgttaccagtggagactctcggtctcaccccagaatctatgtctttaggtgttgctgaaagtttgagaagcattactgtagagctcacctctgctatattcatcatgtacttatttatagtcatccctacctcgttcttttcattggtcggaacttcctgtgactagaccatgggtattccttaattgactgacacaatttgtttcacatacagcaccagctgccatctggcctagtgagacctatgtggctgccattgtttttggctgggagtggttgtgatagatagaggagggagcaaatatttaattagcacctgctatgtgccaagtcctgtgcccagctctttacacacattcttccaagggtgagacatgatggtgtttgctgaagggaacatagggatctttaagtccagtgatttttaaccagctaaagaattgaatatatatatataacatatgcacataatatatatacatatatgtacatatattatatatgtgcatatataatatatgtacatatacaatatatgcacatatataatatatgtacatataatatacatacacacacatgcccagcccttactccagtctagaatcaaaatctctgagaagtagacctggtcaagagtacttagagaaaattccctcagtgtttccattgtacattgctggtgaaaaaccaatggtctaggccagcatcctattgtacagatgagaaaggtgaggcccaaagaggtcaatgagcatcccaaggtcacataaatttaatagcaaggccagacctagattttgtactatctgcctgaggacacacttcacattacctgagctgcttctgacctgcagtgttggggtggaagtagaagtgggtgaagaggttgaactcttgtcctcggatctctgagcttgattgggcagctgggagtgtagaaaacaggcaccacgtcctggagtatcctttccattccccctccacctttgcccaccttccttatgtcctctttggggctatgattgaagaggcttgagacattgaagagcatcaatatctactgctctaagtgacccaggcagctgctgtgacatctggtgtcttcctttatctttgtagagtcatgggcagcacctgtaaaggcaggtgtgaaagaagctttgttctgattcttttttcactgtcccctctgtatcagacactgtcatgggagcccccggtcaacttcttgcttccagttgtgcccagccagcagcaaacagaatgagacatcagctgaagcttttcaaagacatcctgtggaagggcatacagacttcatgtagtggccaagggtgtgattagcactgattacgtggcaaagcggaatagaactaatgaccatgatagctgccatttacccagtgctcactgtgccaggcactctgcttgaatcatttcccgtaatcctgtaacagccatgggagggggtgggagtgggagggggtgtgctggggaggttttatggcctcccataagtggcaagctgggatgtgaacccagttctgcttgattttaaagtccatgaccttaattgtcgtactacactgctttcctagctggatatgtgcttataccttctaacctgccactgctaggaatttaagcaaaaagcccatagagatagactgaactagtgtgtaaggacctatggtagcagatgtcaaaaatggagtggactgtatcaattggtataagatttccagttgctggaggtgttcaggcagggaccacggtacctccttgtgggagactatcaaatggaagatttgactggccatcgcagtgcctctgggattctaattcatcggggcttccaagatatgaatttgtttggaagattctgtcatagagcaataaaatgtactttgggtaaaaatctgtggatagggcattggtgaggctctgaaggatttgattttgcacggactacttccagcaccgagagtcctgctgctggggtttcttagtgcctgccatgtgccctgcactgtttggctctggctgggccccagatgtgagaactttcccacaaggagctccccatccaggagggaagggagagcatgctgtcactgaaagataaactatccagtgccagggagtgtggggagagagacaagtgtgctgcctggggagcttacacgaaggatgcattcaatgaaccaggaaatttgttttttaaatattggatttgaactgggctttgaaggctatatggcattcctttaggttgtaggaaggtggtatcgggtcaccatactgagctgtgtggtgggaaaagcaggtcggaccctaatgtgagccttgagtaataaggaattgaagagtgagcctcctgggcttctttttaaagtgaatagggctccggtaaacttttttttttttttttttttaggatagtagagaaagagcaggggtacattttgtaattcaataagcatttgcattgaggccactgtgactggagcaagctgagcccacctctgttaatgactaagagttagcctgaaggagatgtaggttgggcagggcctaccaggaagggggactggctggtgtaggtaaaggggcagtgcagtgtcagcacctaggtttcgaaaggctccagatgctgagatggtgacagggtcttggacgtaagaagagagagctatgaaacacaggcacaggtacagtgtgaaattttggaaatccctaaaaatgaagccaatgggagtgctgctgtgaactgtgatacgtgtttgcacctggccactggcatatcttctatctctgtttgcagagacgccttctttttatacttcttttgatggtagaggaggaaaggacttgagtcttagagccaaggaggcctggttttgaaattgtcctctgttaatttacagctctgtgacctcgagaatgttgtttctcctccctgagttgcagactcttcatctgtgaaatcggggagcgggcggggtggggggaatattcttaccctgtagggcacaggttgcagggaaggagagaatatccactgagtccagtaaatgcaagtcaggaacattaatcttcttcactcgctcttgttttatccagagtagataactctgttttccccctatataccccacagtttatagagtggataactctcttttccccctatataccccacagtttatagagtggataactctcttttccccctatataccccacagttcatagagtggataattctcttttccctctatataccccacagtttattgcgtggataactctcttttcccctacataccctggctgactttgtgcctttgcccgtgtaatttctaccttccagaaagctactttttcttcacatgtttcaatcatttccatttgtttgggtcaagcctctgcatggttccttggacactctccctaggaatcccaacgggcagcggcttcccttctgtcgttctctcatggtgtgggtaattgttgacctaatgttatgttttgtgtttacacccctctcacctgtcagctgcctgagatcaaagttctgattcatgtctcccctctctgcagcactcagcatgaagcctggcacatagcgggtgcccataaatgggtcttaaatgactgagaaaaagaagcgatcaggctgacaactggcatttccctggctttagaaacctgagagaagaaaagctggtgtaggaaaggagtgtcaggcctgcggcttcctatttcctcattcagggcacaggttgggcttgcccggagccatagttcttgagacttaaccacctcaggcctaaatctgccttctttaattacctcctttccagggaacaggagtccttgttgtctgcccagagctgctaaatatagctccaacccccaggccttggtgtgcttctgggccacagtgctgcacagcctgagatgtctgttgattttggggtttcctcagggattctttacattttcaagttttcataagggactgcttcttattttgaagccagcaaagagacttgaagggcacagagtgttgaaaattttataggaggatgctaggagagagttaaagagcttgggtagagaaggggaaagagaagttcttaaaagagggctaggtggcttaaaaagacgaccttgtcatgcatttaatgatcttcaaaagagtgacatcttgtaatggttttcccaggaaagccccttcacatttgacttttgtgacctcttggtcctgctgttggcagttaatcctttctagcttgaaataatttttttctaagtttttttttttttaatttaaaaggtgctataatacaggcttacagtaaaaataaaataatgcggaagtgtttacaataaaacagtaatttcctgtcccatctcttcccaaaccggttccattacccatagtcaaccacttgtaaccattttttgtttttgagtttttttggtggttactatcatatttctaaataatatgcttctgtctcatgcttgagttactagttttagatatgcctattaaactttattttatgataggtaaggactatttatttatatccaattggtccttcccagttctcttcccaagtcttgacagttacatttctacttttattctttgtggtttcctttatgtttacagaatatgcataaatctcagtcttttgctatatgaacttttgacagtttcgcttcactcactattttgtaagatgaagatattagagtttccctccacttttcctctccacatttacccttcaacttgtcaataatgttttaggttaccttttgcatctcgagggtttataatggatacatgcatataggcacatgtatatattaatggttttatacgtatagctaagtcatctgtgctctgtggtttgattgcaaaagctgaaaaaataaataatatttacattatgatttctaggtaaatattgcttaatacagggctaagtcatgtgctgtggtttcatttccttttctggggttctgaggtcaccacctttaagccacttataggagactgaactttcccttagcatcaaaatctaatagatgattgtaattttttctgtagttgttcagagtcattctacattttgtttattttatttctatagtaaatagataataaataagcttcttattataatttcttcttatttcttaaaattttaggctgtattttgtttttgttgagagaaaaaattagcattttctaccatatctcttatgtattctgtcgttctcttgtctgcttggagtctgttctgtgtgtcttcttcaagttccagcaactttttctcttattttggactggtttctccatatctgggctataatttcttacgcagtttccccctcttccctcccacaaagtttctaattgcttccttttatttaaacccctgtgtttttattatggtttcagatatttccaggctttcatggaggcattcttctggagctcctgagtaatgtcattatctgttagtcatcattattaatattcagaagcagatatgttattaaaatattattcaccaattttttaataccaggcagttttgtttgctctttcttttttttctctactgaatattcatagacattctagtttattttttaattcctatatatttaatagccactctcctagtccactgagtggatgtactatttttaaaatttagccatttacatattgttgaatgggagttattgccagttatttgctcttataaataatactcttttgaacatttttatgcataaagccttttcattaaattattttatatgaattcttcataggggaagaaaactggaaagcctgtgtcatcatctttgaggacatatgccagttgactacaatggtgctaggttttagtggggatcacttggcatttcttacttaagatcctcttttttccttttggaaaggagcagtaagaattgggaggggagtaccacctctgaatcagcacatttagttttcttggcagcttttggaagatataatgtattgggacttattgcaaagttggtactgcctagtaattcactgagttatcaccctccttaaaggagtccccaggggtcagccaacactccatgacttaggcccatgatgctcttgtcacctaaaatctttgtataacaattatttggcgaagtgttattcagcatgatcatctccaactggatcatcacccttattcactggaattgtttctcggtgactttgggaaaaaccagattcattcttaaaactcaaagaggaattcccattgagaatatgctacaagatctacaactgcttctacacgtggtatataaggaagggtttgaggaatggcaggttgttagaatgaatggactgctgggaagaaatacatagtgatgggaagcatggtaattgatgtattgaagatgctgcatcattgttggtcaccctgcaccatggtattactataaaacttcatcaggctagcaacatttactctatggttatggatgaaatctgcatcacataattacacaaaaataggatccttgtctttgaaaagcttaacaattcatagatgaacactgatcatactaaaagaatatgtacctgttgccctatggaaaagacctaagcttaatgactcacagtctaattattttggttagtgggtgataatgtattggaggtgatgatgagacacatacatccaaaatctcacagcttggagaggatgtggtccaacagtgctattttatttatttatttatttgagacagggtcccactctgtcacccaggctggaatgcactggcatgactgaggctcactgaagcctcaaccacctcaggctcagtttgtcttcccacctcagcttcctgagtagctgagactacaagcatgtgccatcatgcccagctaagttttgtattttttaatagtgacagggtttcaccatgtttcccaggctggtctcaaactcctgagctcaagtgagcctcctaccttggcctcccaaagcactggcattacaggcatgagccaccgcactaggcccataaggaagagtttctgagatgtgcgagagtgataggcaggccagggccctctctcaggatataattggggccacgctgtggtttctgatatttgaggaatttggaattctgatttatttttgcctaagacacctcattctctggaatacaaattccacatctataaaatgatagggttgtatctgatggcctgggctttgtaaacccttctgttctgagttccataactctgtgattctgggttctgtcccaagtccaagatgatttgaaaagaataaaaaaaaaagaccttgctgaatcagtaccagcgtcacctgcttcagtctggctgggaagtaggtcagaacttggcagacacgagaatgtggttggctccaactgtgagctctgccagggtcctttgtagacacctgccttagaaagggtctgtgaaagaggggggtgctgacactcggaggtggggaagggtttatttttggctgtagatgctgcaagcgaagaggggtgattgatgagaggaggtattgggggacagggaatgaaagactgaaagaaggagaggagcaggcacgtattgggtgcataacttgtgtggagaaatggccaatattttttttactcctcccacacacactgtaacgtaggtggtaggtgtcattctgtggattttttttttttttttttgagatgaagtttcgctctgtcacccaggctggagtgcagtggcatgatcttgactcactgtaacctctgcctcctgggttcaagcaattctccctgcctcagcatcccgagtagctgggattataggcatgggccaccatgcctggctaagttttgtatttttttagtagagacggggtttcaccgtgttggtcaggctggtcttgaactcctgacctcatgtgatccgcccgcctcggcctcccaaagtgctgggattacaggcctgagccaccgtgcctggcccattctttggattttaattatgaggagattgaggcttggagatgtttaggtacctgtccagctaggctgctggtaagtgagggagaaggagtcaatgtggggtctgactccatgtcgcctcttcctttcacgctctaactgtgccatgctctgttctaggcactggggatatagtgatgaaggaggcaggcaaagtccatggtctcataagtgcttgcattctaggaggcaagacagacaacaaagtaaacaggtgcatatttcagagggtgacaagcgctaagcagcagagtatgacagcagtagaaggcaggagtgacagagttgcatgttgtgtttttacatcctagtccataagattgtgcactgagatgagctgatctgaggaaaccaacagctctagagtaagattcttgaggttagaatttagccccggccataatgtgaaccaactgtgaaagttgagcaagtcacctccccatcattgttaaaatgaaggaaaataatccctgttcttcttatttcactagatgatgaaagaagatgaagtgaataagtttgatgtgccaccatttttaaaactctggttggggccaggcgtggtggctcacgcctgtaatcccagcactttggggggccgaggcaggtggatcacgaggtcagagattcgagaccagcctggccaacatggtgaatccccatctctactaaaaatacaaaaattagctgggagtggtattgcatgcctgtaatcccagccacttgagaggctgagatgtgagaatcacttgaacccaggaggccaaggttgcagtgagctgagatcgtgccactgcactctagcctgggcgacagagcaagactttgtctcaaaacagaaacaaaaacaaacaaaaaacccagttggttttaaaaatacaaggagctgtttttaacagtttggttaacttttaaaggataccttcttatatttatttgctacgctttgtgtgcttggaggaaacaactgtttctttggttatttccttattcttagaatgaagacctcctttgccatcttcagaagagtttggatttgatttgtgggcatcagaggaccattaaaggtgtggagccaagagctggcctttaggttttgccactggaagtgggtgaggatggaatggaggggcagcagccagtggtcagagagatggcttgggtaactgtggaaactggaatcaaattcagtctgaccccacagtttgattcaacacagcagtcaggtcagccagtgagcaaacactcactgaaggtccactgtgagccaggtggtggctgaggaggggaggcataggagacattgaatcaactcagccgttgctacgagctcactgtagctgagtgttctggatgctggggagtcatgtgcttccggacctcaaggagcatcttttccagcagttaatatctgttctgttcccaaaagcatataaatcaatgttgattttagtaggcaagttatccatgcagacagagagacgatatttaaatatgtataacactgtattgaaataactctaggtctgccagaggggaactttagttgctggatcttgaggaggtttgagggttcctagggggggattgggaaaattgggatggtgttaggacaactaggagcctcaaaacataaactatttggcaatgagtaagggaatatttaaatattttagcaacctgtgttgctatatctctgtgtactgatgaatgtcagtttctcatgtggttataccactatcttatagcatcctcaatgtagtacttgatgtgcacacaaggcacagaggaggtagcgattagaaaggcttcatggggttggtgatgcttgagttgggttttgtaagatgaataggagtttggtaaagaactttctaggaagaagagagatcatgggcaagaacaccagtgtgtgaaacagcacaggacttgactggacagttgaggggttcaggtctaagggattttgtgctcaggtaattgtgagcacagtcgtcctgttaacagcagggaagaaaggagaaagagcagcacatccatttaatctctcccacagggtaggggaaatatcaagatgagaccatttttatttttattttaaataatagctatcacatgccaggtgttaggcagttagcaaacattgtttctaatctgacagtaactccatgaagtaggaattttcattcttcactcattctacaggttaagaaatcaactcagcatatttaagtgacttgcacaaagtcacacaatggcaagaacagggtttgatctcagtctcatctgactacaaagtctgaacgttccgcttttccactgtatggcctctctctcctgggaatttgcagtgagtgacatccatgagaaacagggcccttttcttgcctagaaatgtaagttgtgacaaaaactggaggtgtccgtatcctgttctgcaaaacgaggacaagagttcttgctccaggcgtcggcagtgctccggaaagacgaggcctcagatgtactgctttccaataccttcagcaagaccattctcagggagatgtttctctccatctttccttgctgcccctgagactttgacttgactttttactcctgtgaaacaacctcctgatggtgatagaaagaataggctgaccacatggacattttgtgtttatgctgttgtgacagggctttcttagagtaaatcaataacatgttcctggttgagatttggcctgtcctataacttgactttagggagagaatgtgctgattatgctgaagatagcgtgttggtttgtgtgtctttcatgtttattactgtacaagaagaagttggcgttctggtacctcccctccctcaaccattacaacaaggaaaacaaaatccactgagaggcagcatagcatggcgatgaagaacatggactgtgagctagattgcctagattcagttcccagctctgtcgctgtctagatctgtgtctgtgtctcggtttccttacctgtaaaacgggaatgatgataattgtagctactgtacaaggttattggaaaggttaaatgagttcatatttctaaagtatgtaaaaaattgcctggcatacaacaagtgccatgtaagtgtttgttaagtgaggacaacaacaaaattttataaacttgccctgctttccactgttccttacaggacatgatatttgcacaagtctgacctctgttgtgtgtggtcaggcactgaagggtgacatgttcacatgtgtggtctggtggacactagttttgatgactgctttgccataagaacttcgctggctatgggaaaatgtgtggttgagaaatagcaagtagaaggttctttttttttttctgctagtaggatagagtttgggttaaatggcatttgcagctgagtttatccatttttaaatttttcctggagttacactgtgcagcctatgcatcaatggttttatctggctcgattagtcagtggatagtttttaatttgacttaaaaaattgggggtcacataaagggaaccagcaaaagatttggattctgatgaacaaggtttaaggctcagctctgccactgacatgctgtgttacatgggcaagtccccactcaccatctttggtcctttatgtactcttctggttctcattgtttcttccctgaaaaaatcagggtgctgaatggtcaggtgagctccctattctctgttggtgagtggccctcattcctggtcagttagccatgggctattgagggaagatgttttatgaagtgtattgatggtaaatttagacagcaaaagaatccaattgatcatcttaattttttcctctgtacttcgtaattgtgccgataagaagtcctcatttcagctttacaccttttctaatttcccagatatttctgtgtatcaccagaaggcagaatggatccaaatagttattaccactcagctcttagaagttgtttgggctggagaaatgttttcattattaggacactttctgggtcctctctctagagaggcaactgagcctcaaccataccatctcccaggctcactccgtcctgcccaatctgtttacatctctactttggaggcaagctctatccagttctactaacctcagtgcgatgactcagggaaaacctagtttctttttcctaggaaaatcaggttgaccacaacttctgtagttcttgagggaagaagggaagtataatgatgttggaagtcaaaatattgacattaagatagccaagtggagttttattatgtatgtatgcatgtagacatgattgaaatgtatattacaagctcatatgacatacctttataatagagaggtacctgtggattctaccttacttttgttagtgttttcactgtttcatgtgagttttacaatgaacctgtgagatttgcagagttaagagttatatacccgtctatggtagaaaacacaggttcattcagaggagtaaagtggcttgcttgagatctgtgtcagtggtagtcttctgactagtgtttcacagagttgttttgacctaagaaagttagagcctgggccagacgcggtggctcacgcctgtaatcccagcactttgggaggccgaggtgggcagatcacctgagatcaggagttcaagaccagcctggccaacatggtgaaacctcgtctctactaaaagtacaaaaattagctgggcgtcgtggcttgtggctataatcccagctactcaggaggcttaggcaggagaattgcttgaacctgggaggtggaggttgcaataagctgagattgcgccattgcactccagcctgggcgacaagagcgagactctgtcaaaaaaaaaaagaaagaaaaaagaaagaggctgacgaaatttgtgatttttgaagcaacagaggaaatttagaaagaatgaaacttacgccgttaatattaagttataccaaggatctactcataatataacccaagactagaaacttaaagtactgtatagttgataaagagaacgaagccgtagagagtttactgaatttctcaatgaagtggcaagcatctatccatccttccattcattttgtcatattattagaaaaaaatacacagcatgccagctgccatgttgagccttgattcatcaaagttaaattagaatgacatatggcagtttagcatttaaaatgtggctagttcgaactgagatgtgccgttaagtataacacaccagatttcaaaggcttagtataaaaagtaatgtaaaatatcttattaataaattatatgatgttcattacttcttggaatgataatattttggatatattgggttaaattaaaatgcatttctcctatgatttcctgctttttaaaaatgtggctgcaggaaattaacaatttcatatgtggcttgcatcttattccttttggacagcactattctagcttgtgtctagtagaggaagtaagatttatacggacatgcttttctgagagcgtggcatctcgcttctttactcctctgcctttatatttgtctctactgcctcaccttcttttggcttcttaacccattctggtcggatggaagttgttcttgtccgggtctagagggctcagatgcattcctttttagcagtgctcttatttggcattggtggtgctgtttctgttgaccactcccagtgtctctggatgttttgttattcctttacctccctagcctctccttggggtttctttgcaggctcttgctctctcttgtatcccataaatacaagcattgcagagctttgtctcatgactgctaggtgtttatctccagtttggaactcctgaacttcaggcccacactcctacatgccttttggacactccagttggaaatcccaaagttgcatggggctcaccgtgtcttttggcattgttagcttggtgagtgacatcgcccaatcctggaaactgggactcattccggatggctcctctctgtccttcactcttgcctctgactgtcctcagtcttacagagtcaaccacggtaacacgtcctgcccacttccctcctccctctacctttggagcctgtcctccattcaggccctcagcatctctctcctggagtgcttcagcagtctcagctggccttctttttctattcttaccctcatccatcctattctctcttttcttcctgagtgatattccaaaaatgcaaatctgttcatgctatgtccctgtttttaaaatccttcaatgctttcctcattcagggcaaattaagaatcctttgcatgaattaagggacaggaatggaaagaggcaggaagtggtttgacccctgcctctttctgtcctcatctcactaatctccaagatgatcttgtgctctaggaatatacctgggattctctgtagctcccgtgacctcacacatagtgttcccttgtctgaaacaccattgcccactctatcagtcctttcaagattttgctctgataccacctctgcctggaatactcctctgactgttattgtctctgcttcctccattttaggccatttgttgaactgggctgcatttccttgagagcaatggtaattctttatatttctgtatcttcaaatcaaaaataggtgtgcaagtgatatttgttgagcaaataaatgccaaataataaattgtatagataagacattgtgggagttgagataaaaattctagccaggtagggatgggagcatggagggttcaaggaatggtgacatttaagattggccttcaatttgggtagtattgggtgggacagtgcagaggagacccctatagtcatggttattgtgccatgttctgcaggactgaaggatattgaataggcccattccctgctcaataccatcaccaccagagtagaataaggatggtaatctcaggagtccctttgggctagtgtctatcattttctcctgagctgggttatataactcggcagagctttattgccccagtacacagctggcatggcaggcaggcactccgatccttgcttgtgagctgccttggaggaagcgagtgcagaatggttgcctgcgttttcatctttacttctccttcacagccgcctttctgtatagcatagaggtgacctcagcaccagagacaggaaagaacacaatgagtcatctcaggccctaatgaggtgcataagggaccctacttaagagtgagggtcaggtgaggtcatgctatgcctggggtgagttttgcctcggggctccaggcggcactggagcagagctgagctaattttacccacaggagctgactgtgctgaagggcagggcttatgacattggccttatcatcctgtgatacccagaaagctcccaaggtgcaaccccgttatgtctgggctgttttcccctcttctagttaaatacatttttccattaggcgtgcatatcgaaaagcaggatgctgaggtgcaaagagctttggatttgggtggaaggccacggagttggatttggatctcgcccctacctttgaccttgcacaagttacataattcgagtctcagtttcctcatttgtaaaacctcattcgtatacctgtgtcctaagattgcttctaggtttacacacttggtgaaacgtagcaagcgattgctatgtgccagtcactgttctagctgctttattcatattgtttcacttaatcctctaaagaaacctatgaggatggtgttattgttatccctgtttataaatagggaaacaaatgcacaaggagcttagataagttgccccaggccaccagccagtgacagagctgaattcaggccagtggctccaggcaccacactcctaaacaatataccttattgttttgaaatgatagaaactttccttgctatatagcacaggcttaatgttttctaactacctgctgtgtataagggcctgggcttgatgctgggtaagagagcagcatagctgttgtgctgttctgtagacttgaatcacatttgtagatggaagcccttggtcagctgaagggtatggtggatagactttggtatctgacattgtaggcactgggtggagtgctcctcacacgacctctcatctcatcctcataacttcttcaatagtcaggcattggcatgcccattttacagatgaggtaatagagaggtagcatcacctcctcacatttacttggtagacagagcgactggggctgttgggtcccatgtttatgttgattcatttgcattccccatgaactgtgcagtgtctcagagctattattgttgcagaactcacccctgcccttctgcccaccactgacaaccctagagaaactggtgtccatgaaaaacgtgggtcaccagatgagaaagtcacatctgcatggtcagagcaggcaccaggtgaaggtaaaagaaagggctgggctttgttccaattgtttattactgtgtagcaaattacccccaaactcagtggtatacaacaatcgtttagtatgctcatggattatgtggatcaggaacttggacagagcaaagggggaatgacgcttctgtgctccacaatgcctgggatctcagctggaagactcgaaggctgggtgctagagggatatggttgctcactcactcacatgacatctgagacgttaaccaggcctgttggtcagaatatctacatgtggtctttccatgtggcctggacttcctcacagcctggtggctgcttccaaagggcaagccttgagaggaagggagagagggagaaagagagcgagtgagcattagcaggtgcaggaagaagctgtagatgcatcatctcgctatactttattggtcggagtagtccccaactcgcttagattcaaggggagaggcaatagactttacatcttggtggggtggccaagttctggaagagcatgtgggacggaaaatttgctggagcctttgttggaaaatacaacggaggctccttttggccaaaaaggaggaacagacgtctctgtggagctgcacggaggtagagccacagggtatgcagcaggcgcacctgtatggtgctgagtattcactggcaaatcaggaaaacaaaggtcaagccaggaatcctaaggaaaggatcagtagttacgctataaccatgcttcattgtatatgaattagcgtttatattgtccataaactagtttgtgtaactctgatttgctgattacatcgactgcttatgtaaccctggagttctaggtctattttggatttttttttttttctgtgagatggggttttcctgttgcctacctaggctggagttcaatggcgtgatcttggctcactgcaacctccccctcccaggttcaagacattctcctgcctcagcctcccgagtagctgggactataggtgcacaccaccatgcccagctaacttttgtatttttagtagagacggggtttcaccatgttggccaggctggtctcgaactcctgacctcaggtgatcctcccaaagtgctgggattacagccttgagccaccgcgcctggccctatttggcttcttatactaaactgagatattttttgttccttcacagaggcaagggagaagcttttagatatagacagacataggtctcagccaaataaataaagaatgagtgatcggttaatttatctatttttttttccctcctgcatctaacaaagttcaggaaagacattctgtataatttaacaggaaagagatgctaacaaagttattgaaaagactggagctactgggtttaagaatttttttttttttttttttctgagacggagtttcactcttgttgcccaggctggagtgcagtggtgcgatcgcggctcaccgcaacctctgcctcccaggttcaagagattctcctgtctcagcctcccgagtaactgtgattacaggcacatgccaccatgccccactaatttttgtatttttagtggagacggggtttcatcatattggtcaggctggttagccacaatccagggataaggaagatgtgattaggaagccactgctgaggcctcagaaacttttctcaacatcttaatagttagtgatggggcactggattggcctatggagtgtccttttgcccttcatgattccctggtattgcttgccagtagaaatagtagcaggaagattcagcttcacttccaccttccagatcacacacaaggaaatcttactggcggaacctaatttactagctttgaggaagtatggggaatgtaatttttaagtcggcttctgtgatgcagaaaggcactctagctggtggaaatagtctgattgagccagccaagagaatatatctacccccaacttatccatttaaaatccccaggagttattattctgaaatacttaatgtttataagtaattataacactgtaatataattacactatgaaattatgtttaatatttgtttatttatgtaaaatatataaacttaatataattaataccctgaaaaaacaggccagttgcccacgttcagtttctgaactgagttcttatttttgacgacagcagttgatttgcaattttccagttcagtttaatctcctcctgggagtcataccctaggacagttgtcttgtttacaaaatttcttcacaaacatttattaaacacttactatggacctgtccctgagctggatttggcaatgtggggagagagaagtcaaggattcttccactgggagccaatactgggaaggagaataaatcaggcacacagttagaacagggcaaggaagatgttgatcaatgccctacacagcaggctcagcaaatccagggaagagagattattctgactgggctgagaagtagagagttttatatagtctgtgatccggtgattctcttttgggggtagtaccatctcattatggggcatttaaaaatgtgacggatgccaggcgtggtggctcatgcctgtaatcccagcactctgggcggctaaggcgggcggatcacttgaggtcaggagttcgagaccagcctggccaacgtggcaaaaccccatctctactaaaaatacaaaaattagccaggagtggtggcgcatgcctgtaatcccagctatttgggaggctgaggcaggagagtggcctgaacccaagaagtggaagttgcagtgaggtgagatcataccactgcactccagcctgggtgacagagtgagattccatctcaataagacaaaatagcagcataatggggtgtcttctgttgtcccaacgactggagatcaggctgccattggcatttagtggttggggccagggaagttagacgtcctttaatacatgaagacaccacagataaaaaactgtctttctccaaagggtcatctcattcctgttgaagactacgagtgtgcttgatgatgtgtaggacgtggatatttggtgttgggagtggaaggatagcaggtcaagcagaggggacaaggtgagccaagagtttagtttaaataaagcaaagaatatgtgttgagtggcaatgggagaaagtttatggtggcaatagaagcttcggtcccggttgtggagaaactagagctactagataaagcacttggacttcccctgttgccattgggaagccatttcagatattggagcaggtccttgagagcagaaacgtagcctcgtcttggcaccatgcatcatgtaaacatcagtaatgctttttgaatgaatgaatgcctcaaactgtagtttacaggtgttagactagtgggtacctgagttttgccagatttaggatcctgtggttctgggagggccctggcagccagcatttggacttttagagaatacatggaaagggcacagtggcgtgccacacagatactgtctccacattgtggtcaggcagcagcagtacttgctgacaccgaagagagatgtgaaaaagagagattcttgcatggactcctgtgtgaggcccataagccatgaggcatgtagggagcagactgtgtcgtctgcatcaatgctcttgcatcttgagcttttaaaaaattgccattcaaaccagcaatttgctgacaaggttcacgcgctatgaccatgactgcagttgatcctggggagtggcttgcttgtctgcctggggatggcagccgcgtgcgttccctgtgctgtcctgtagggttgtggtggctttctgatattcaggttggtcccttttccttctttttggatgggctttcgaggttgggagaggaagctcagggatggaactgactaaacatatgtgagatgtttccttgtttgctgctcatggaggtttcatttctgaagtcttttcttgggagggaaaaggatgtgtggatatatgaggtgactctagaaccctcattttatggatgaagaaactgtgattcacagagggagagtgatttgtccagtgtcacgtggggagctggccggggagccagacctcctgtaccttttattgcagggtttattttatatatatttgctggcaaaaagaaggaaagagaaacaatttatatgttttttatttataataaaaatatttattataattatataataattaaattatagtaaaaatatttatttataatataaatataaaatgtatattatattataattatatataattatattgtaattaaattatatataattttatatattatatattatatatattaaattataatacagcatattgtaatacaatatattttatattaatatagtatagtaaaatatataatatataatataatttcattataataaaatataataaaaatatttaaaaatgtattttatatttacatatatatttaaatatatacatatatttatataaatatatattaatatttatatattaatatatatttttataaatatatatataatataaatataaatatatatttatataaatatatataaatatatatatttttaaatatatatatatttttaaatatatataaatatatatatttaaatatatataaatatatatttaaatatatatatatttttaaatatatataaatatatatttaaatatatatatatttaaatatatataaatatatatttaaatatatatacatatcaaatatgtatatatattttttctcttttttgtagagagaagatctcgctatgttgcccaggctggtctcaaactcctaggctcaagcaatccttctgccttggcctcccaaagtgctgggattacaggcatgagcccctggccttatagcagggtttaaattacacccactttgggggaagagagagtggtgtgtgcaggctttggtgccaaaggcttgcacatggttactggctcagccacttactataaaatttgtaaaataggcaccatggacacatctgatattaagcatttaaaaagaggagctgtgtgaaaagttttgttgactacaaagagctacagacatcttcctttttatcttgatgtggatgtttatgcactgggaattggtggggccatctttagagaaggggtgggccagtgaagacactactgaccataccccaatcagaaaacactcccaaggggctcacttccccactgtgcagtaaagaggttttgcactgagatttggaggtacagcacaaggcggggaaagcatgagccaagttttgagtcctgtggaattgagggtgcactcctgcctggggccaggggttcttgtagcaatataaagggagacgtggctaaaaacatagattgggctcatcctggaggccttgagtctggcctgagggtgagtggatgctatcgtttgtgttgtttagagcactggtgaggagtcaactgggaaaatctcaatgaaatgcatctttaggatgtgccgggaatcttggcagtaactcaggagggcaacagggaatcttgcaattggagtagcggggggtgattctcaagttttggacacattctaagtaactttttgcagtgcttcaactttttacttgagtttataataacaatggcaatattttttatagttgtagagctatatgaaatatttttacacctgttggcttcattgttcatacaatatcttagtgagggggaaggtaggattgttttcgttcctgttttacagacaaggaaattgaggctcagagagcagatgggatttctctggccgcttggctggttgatgtggaagtcaggagtgaggatgccaagtttcacacttcttcctgtgccaatgacctggaggagtgtttttctcaaactcacatttctttatcctccacagtcttgggtgtcactcttggaagtgtaagatggtcatgagtttcaaagatttctgagataagctgttaagattttcaaagatgagctatagagaatttgggacataaaatgtgtttcttccagtaactcttgcttgctatcatgttgttggttcaaattgaacatgttgataagtgccagggaggaaagaaaccagtacctgctacttattgggcaccttttttgccctgaactcagtactgcctgcttttccatttgagtatctagaaacatttatggatggagtgattgtaatattgtacaattctgtcaactagtttattagctaattctcataaaagccttaggaggtagataaacaatattattttccattttacagatgagaaaactgaggtttagagagatgaaataacttgcttataacttgcttgagagaacacaggtcctaaatagattataatctttttttttttttttttttttttggcagagtcttgctctgtcatccaggctggagtgcaatggtgcaatcttggctcactgcaacctccgccccaccaggttcaagcgattctcctgcttcagcctcccaagtagctgggattacaggtgcacaccaccacacccagctaatttttgtatttttagtagagacggggtttcaccgtgttggccaggctggtcttgaactcctgacctcaagtgatctgcctgcctcggcctcccaaagtgctgggattacaggcctgagccactgcacccagctgtaagtagagtataatgtaagttttctaatttgagacttctttcttccttgctgcaccccatctacgccatgtgttgcccatcccactggtgaaaatgcagagctgcttgttaaggaggtacatgtcagaccttggaatttactggaatcagacctggaaggtactatgaagagctcagaaggctggtggttttcaagctgttctcttctgagcctgagagactccaggagtcatcttgagggatatagcacggagggaggtgaaaagtggtgggaagtggaggaaggaaggggaccgctagagccaacctgagtcgctctgctttttcctattttgtaagctaaacattgtcaaagcatccatttaaaggaaaagttctgctgctacatataaaagttaaaaaaccactgtgtctacccttccttttgctaacactgagaggcagagtggttcagcacaaggggacacaaagtggcttagcacgagtcacgagatgtgacgggtctgagacctctcagcctagagctcccttacccctgggccactttgttagacacacctcctttaattcaaatccccgtctcagtgggacatggctttttcattttttcaaggaaaggtttaatctgtccagatccctgtgaagatcttggctcttggcgcacctgctggaggttcgaggtcctgcaaccacagagtagctgcaggaccttcaggatgtcccgagccacaaggtctttgacctgcattttgcaacctggttgtgtctcccctttggactctgggaaccttgctgagattggtacaatatctgtgctaaaaaggtttgaaattatagctagtattgtgttaccttcctggtccaaccttcacagacattgtctgactaagtatatataactcttgagtgttcactgtgtacaccggctcacaagaaaggcaaggttcctgatcccaaggatctaatggagagacagaaacaaatataaacttttgtcaactatttcagagacagttatttttgttatacaagattgttatgcatgctagttatgtggagaggatttcatctcttagaaatgagacggggagaatctgggcgatgagaaagaagaccagaactggggagtacagtctagaattgcaaggggttgagtttgctatgtgaagcagttagttttggactgttgcacttactatttctgagatttgagcatctgacttttcctttaagcttttgttttctcatttgtaatatgggagtgagagtgcctagttcacagggtcattgctggggttaaatgagataatgtatgtaacctgcttagtataatacctagcacagagtaaacactcattaaattttcattgttatcgttgttatgatttggcagcgaggagtcaaaagagcctattttcttaaactcatcaatggtataatcagagctttgcatctcgaagtaaaggaacactctgcttttattatttatttatttttcactctgcttttagacatagaattcaattgcctcaggctacaacaaactggcttcaatctacctttctgagttaacttctgtttatttctatccatctgcccacttctctcactagtgacctacacattttcttttttttttttttcttttcttttttttttttttcttgaggtggactcttgccctgttgtccaggcttgagtgcagtggcataatcttagctgactgcaacctcttcctgccgggttcgagccattctcctgcctcagccccctgaatagctgggattacaggcacacaccaccacgcctgtttagtttttgtatttttagtagagatggggtttcaccaggttggccatgctggtcttgaactcctgacctcaggtgatccgcctgcctcggcctcccaaagtgctgggattacaggtgtgagccaccgtgctccacccacattttctaagcttgattttaacttgctggtctttgtcatatcttctcagtcattgctggggttcaaatctttcttttctttttcttcttttttttttttttttttaaagatgggaatctcactatgtttcccaggctggtcttgaactcctgggctcaagtaatactgccttggcctcctgagtagctgggaccatagacatatgccactgtgtctggcttaaatatttccttctgtcggaatgccctttgttccttcatctgtgcccccctgctccatcctcttttaattcctagcccaaaagtctaacccacccattgggagggattctgcagaactcatagagtttacaacatcttgtccttcaattgcagtcagtctctgtcttgaactggatttgtgagctccttgaagttgtttgtatctcacagctctttgctgtaacatccctggggattcaagcacgcacacatagtagatgctcacacatctatgcaataaattactttagtgtctttctcaaatgatcagcacaggaagcaaatgataaaatgcaaaccagaaaacagacctcactgggctctgtgcttgtcagccttgggaatggatttctggcgaagatccggcccctctacaaatgacagagatgacttggctcttttcaggaattgaagagaatcctgacaagtggcatgttgggaaaggcctgaaggaagccagaccagcttgctctcagagctccttgggtcccctgcggcccccaggtgatcttcagcaagacctggtatgtaaatgagcctcatctgctggctcagcctgctgcccactgctagggatgctagaattccagggtaagcttctgtgagccgggctgggaggtttagtgggttggagattactagctttttggtatctgcagcttgaaataccttgtgcccttgattaattcatgcttgggagcatcctcagtgctctctggaaaatagctccttactgtatgtttatttccccacgggcttatttcagagagactggagcctgtgtttctaacagcttctccaaggaaaacatcgcaggccacgtttccggaactgagaatctcagggggtctttgaaacgtccatctctattacctccttttggcccagcatttgcttttagctgaaaagggagattttgtcttgagccttcctgtagacatatgtgacttggagtttgaaaatctgacagctgctgctgagctttgaactgcaagagtgagcagcatatagacataaccccgtagaacatcaaatcattttcctttaattcccagagacttaatgtttctttgtcttgcgaatgacctcactgctttttgtatttgtaatggaatgcacagtcatttgtaagtaatcacacaataatcccttacacttttataatgccttacccttttccatagggctttcactctcattatctcatatgatccttataactgctctgagatataagcagagcgcctattttaatctccaattttcaggtgtagaaactgaggttcagaataaagttagccagagttaaaacagttagtatgtagcagaattggaaagggagtctacagaattggaactggagtctcctaaaccagtgtttcttttgctccttattgctggtgtgaccttgggaatatacttaacctctctgaacctcagtcttcctatcactaaattgggtataatactacctcctgggatagttgttggaagggattcaatgagactgggaaatcatttaataaaaggtagaacacactaataatgggaggcatcattgtacttactacatgggccttgacggcgaacagtgccatcagaactgtgaaagaaaataacattttttctctctttttagaaagacacaggttcagaatggtgttgtcagggatcacaagctcccagccccgtgattagcaaattgaccctgctgccctgtctgctggctgctttcttattctgagaattgtgttgacaagaccctcttttcctacagagctctctcttaatgttgcttggaatagccttgtgtcctggagacagttttaggtctggcaggatctgagaacaggagtggggatcttggaatgggatctgcatccctgagcttcatccacaaagggtgggaatgtggcttgggctgtggggtggaggtagatgaacagctggacttgcaggtctatcttctgttgtttctcaataaagtagacaagtccatctgatgggtgtttagtagggtatgacttgtgagtccacaaggccagcagtatatatgctgaatggactgcttagcagtaacacactggaaaaatccaaaaagaatggatttcaagttggcaaaaaatgcattagaagtcagcagtgtgatgtggtcaggagaacaaccagagtgactgtgggatgaggtcttggatagctttgtttctatatacagtcagccctctgtatccatggtttctgcatccatggattcaaccaaccaaggctcgaaaatattaaaaaaaaaaaaaatccaaccataaaaaaatacaaataaaaaaaccaatataatataacaactgttcacatagcatttgcattctcaggtattataagtaatctagagatgctttaaagtatacaggagatactacctcattttatataaaagacttgagcatctctggatttcggtatctcaggggtcctggaaccaattccccatggatactgagggaacgagtgtacatactcacctacaaaaattccaaaccagtgagacagacataggttgaaatatggtcctgagaggcagaacgtgaagcaagggatggaaggccggggaggaaccagatttcagttccgtgtaaggaagaactttctgatggaaagatggaatttgcagtggcaggagataatgatctttgcttcactggagacctcaggaataccaatggggcaggcactgggcttaatggcctttatggccacttctaattttgagatcacagagctaggaggatgagaggcacacatatattgaaggaactgaagggtctctctctatgtggatgtggaaactgatctccaaatgtttgcaagatggagggtacgtttaaaatatttcattctggttttcatattgatctctgtggctctccccttggtctttggtttttaaagcttaagaccattcccagaagctcttttccatggaataatctcctttctttgctggaatgctcctgttgggatgcaggaagggactctgagctcctgacagaatgaagaccacccctttttgctctccagacctaattttgacgtcccacgcccacccgctgaggagggttgcaatggcgagatctctgtcctgaattctggttctggcatgcagtggaaggccctctgattctgtttccttacctattttaatagtaacttatatttgtgttccttcattaaatgtacaataaataataaatgtttgcttacggcatgcttgttaagtataaaacaaataatcaaaatgaatgtgtaatgaccctttggatagaccaagtagaagctgcttttaggacacatgattggaccatttctagatatctgcctaatttgtaaatgaaaaatatgtaagctacacaaggagcactgactcgtctaaaatcttaacgactgactgatttgggcttggggtttggggcttgggtccttcatgccctgatcagagctgtttatagcttgaagacttcctgggggtgagaacaagcaacctcttggtgcagtccaaagccaggaaatgggtgacgattttgaaaaaggactcatctgacctccagaaagcctttacaaccaacagtagaacgagatcactaagaaacagaaccaccgggaagccaagatgtggtacttggattcccatctcggagcacctcctatatcccgacacaccatttcccctagtgtctgatctctctttctcctcctttaattcagtctggagtcattttagatcagattcattcctgattggcttcactgctccaacttagtcatcacagaaccttagggttggaatccatgttacaagttaaactgagcaattcacccccacttttcctgacaacagtgttctcttgagagtctggttttattctgagtcttccagcccggtgtctgtgcccatgaaggactcatgccaaattacattctcaggaggactcccagaccaagagactctgggcttgggcgtgagagacttggggctgttctttttctttttttttttttgagaagaagtttcactcttattgcccaggctgacatggagtttcactcttattgcccaggctggagtgcaatggcacagtcatggctcactgcaacctccgcctcccgggttcaagtgatactcctgcctcagcctcccaagtagctgggattacaggcacacaccaccatgcctggctaatttttgtatttttagtagagaccagttttcaccatgttggccaggctggtcttgaactcctgacctcaggtgatcctcccgccttggtctcccaaagtgctgggattacaggtgtgagccactgtgcccggccgagaggagttgttttgagactcacctgccatcataggaaccatagcttaaattcttgtgaccttttcaggtgcatctcccaaaatatctcccctccaccaaattaatgatttatttcataaatttagttgcattctggatggtctcattcttaagatgagcttaaagcctttcagaccagtcacttccttgtttggggtggaggaggttttttcctggaataggacagtgtatggaagggttgagaatccacttctttagcggttaataatttactccgagtaaggaattctttgttaaagtggggcatgttcttcaagtgccagagaagagagaagggtgatttttctgacatcctccagcctgcttctccatatttggaaatgtttacccaccaggctgatctattggaagagagggaggtgactcagggtttaggagaagcaggatttgaattcttgtttccagaaacaaagtcgtccccccaccctgcccccacccttcccccttcattcctctgtcccttgttctggaagctgaggcgagaatgtctcagttctgttcccttcaggcttcgagaccaccgccttgctgtgtcccgtagtggactgagggcctgcaagagggagtgagggctagtggagggccagctgcctgtgggggctggacatcgtgtgagtacatcattactgccatttctgctcacagacctggggcttacagcctgtgggctggctcacttgcatggtgatgggacacgttgctgggagtgctggtcacttttatttgggggtgtggacagctgctttcccaggggagtacttcttacagtgggatttcaagacaagatcggcctgaagaaaaattatatttgtatattttttaaaaagtaggtatttcctctcatctgaggcctaacttgagttgggtagaaagacaatttgggagtgctgttgtctgatgattaaggctaaagcaacaagctggaagggatgtcgggatgtctgtggacatgtagggaggggtagttttagcttgaaaacagttatggtgggatttaagagtatgcaaaatgttgatgtgtagcatttgcacagcatccacggtctggaataccttgtgtgcaggtcactgtgtagatttgatgagttgtcagagttggaagagtcctgcagagttttcagcacatctgtctaatttcacagtgtgagataatgggcagcagagacccaggccctgaagacagatggctcattatgtgggattagaacccagatcttctctctcagttcgttctccttcccctagacttaagctgccccctctattgcgagatgaggaaattgggagatgttagaactgtccacacttactaatctagttggtgggaaattgaggactagaacctacttctagttcagacctcttcccgttaggatatatgggctcagatgcctagatttgttgtttttgtatgaggctcttttcttttctttttgttctttgatttttacttacctttcccttcttttgttcatgtgaatgtcgtatgaatgcaaccttctgctctcctttgctccctatatctttctctttcacgaaaggggatgatcacttgtccaaaaggcagaatgaatagtgtggaacttcctttctatccatggaagtgaaaattatgcaattttccctgagagaaattcagcaaggcttcccatctgagcctctaccactattcttgaagctgtaagaattctggaatattatgcccattcaaaggtgagtcctgattctgattagattttaaacacacacacacacacacacacacacacacacacacacactttttaagcctaccaaagcaggatagagacccagaagacaccgacctattacgtcacctcagatgtttcacagccatcaggagtaactctttgtagtcagctcagtttcagatcaacttttttttttttctttctttcttttttagacagagtcttgctctatcgcccaggctggctggagtgcaatggcgcgatctcggctcactgcaacctccgcctcctgggttcaagcgattctcctgcctcagcctcctgagtaactgggattacaggcatgcaccactaggcctggctaatttttgtatttttagtagagacagggtttcaccacgttggccaggctggtctcaaactcctgacctcaggtgatctgcctgccttggcctcccaaagtgctgggattacaggcatgagctgctgcacctggcctcggatcaacttgagggccttattttccagtgcagggaagatggtagaaatatgttttggggaagcattttattaccagtggcattaggtggcagatgtaatagagcagaggaagtgctctgagacctatgtttgttctggccagttttaaagagaggggaagcgactctctaatctgctttgaagcaagtgggaggagggaagttgcacaggactcccaggaacctgtacacaatctgtctccttctgtgaccagctgaggctgggtggtgactgtaagccctgttcatgagacaggaggagagagccttgaagaaggaaagcctggggtgtttttctgtggtgctgagggacagggacagtaagaggttggagtaaataataccagtatgaatactaatactctgaataaggacagctgacaagcattggttgcttaatgggtgccaagcacagggctaaacactttacctaaattattgtggcactatagctgcctttgagtaggaactattttttaaaatattatttttaattttggtgtaatacatataaaatttgccatcttgatggtttttaagagtacagttcaagcctgggcatggtggctcacgcctgtaatcccagcactttgagaggccgaggtgggcagatcacttgagcccaggaattcaagtccagcttggccaacgtgatgaatccccacctctactaaaaatacaaacattagctgggcctggttgcatgcacctgtggtcccagctactcagaaggtggggatgggaggattgcttgaatccagggagtggaggttgcagtgagccaagattgccccactgcactttaacctggatgacagatcgagaccctgtctcagaaaaagaaaaaaaaaaaagagtacagttcagcagtgttaaatacattcatattgctgtgtaatcagtctccaggcctctttcatcttgcaatctgaaactttgtacctataagcaacagctacccattttcctctcctccagcccctggcatcctccattctactttctttctctatgaatgtgactactctaggttctgtatctaagtggaatcataccgtatttgtctttttgtgactggcttatttcactaagcgtagtgtccttaaggttcatccatgttgtagcatgggtcagaatttctcctttttaagggtgaattatattctgtggtaatgaatataccacattttgtctatccatttaggtactattttttaacctccatgttatagaagaacagcaaccagagacttcaaagggttaattaagtaagtggcccaaagtcacatagtcagtagtggagactaattttacctaagaatggcatgtgatcaggagtaagcagatattggattctaattggcaagagtgtgacaaatcagggtgcttctcaactggatggtgacacctccttacaccttgctatggcatttcaataaagcaagtgttccaaagggctgtacgcagctatgcttcctttcttttgtattgggctctaggaagcccatagctaaatttaaagctcacctctagcaaatggtatgagacatccagctcttattttttgtatccctttctcctttctttgctttattttctcctctccttacccactttctcacttaaatcatgaactattagcatcttttgtcaggtacctcagatcatttctggaacaaggcagaatatatagatatgtggcatgatatctaatattttagtaattattaagtctgtggaatagtaggccaaaactggccatgatttttctgacttgactctgctcgtcttcttcttcttccttttttttttttttttttgatggagtctcactctcttgcctagactggagtgcagggcgtgatcttggctcactgcaacctctgcttcatgggttcaagccattctcctgcctcagcctcccgagtagctaggactacaggcacttgccactacaccccactaatttttgtatttttagtagagacggggtttcaccatgttgaccaggctggttttcaactcctgacctcaggtgatctgcctgcttcagcctcccaaagtgatgggattacaggcatgagccaccacaccccacctaactctgctcataatgcaatgtttcatctgggcaatgccctgcccctttctgagtctcacttttctcacctgaaagaggaggttactgttgatgacagtgaacatttaggctgtgctgagttttacactaagcatcctgtctctaactctcccaacactcccacaaggcaggtgctattatccccattttacttttgagaaaattaaggcctaaagaagtgagaaagcttgtccaaaccgctatagctcttgggcaaaggcattagtgaccaatgtgtatttgactccaaagcccaggatgttagccacagtgcagggctactatccttttatacaatctgtcaggcttcttccatccgtggcatgtattcatctaattttattaaatctttattgagtttccacttaggtgccttgcactgttctgggcattatcccagtactcgatttagagcaaagagtaagacacacacaacaacgatctcttggtgcttacacgctgctgcaggtgtgtgaaggaggcagataaaggaacacttaaacaagagggactgataagtaacccaagggaggagtcacaaagggcattctgactgtgagtgagtggggaaggactctgggaggttatgtttaagctgagatctgagtgacaaggaggccaccttgtagaagttgggggaagagcactgcaggcagtggagacggtcaatgcaaaggtcaaggctgtgaagtgggaaggagtttgtgtttgaggaacagaaggagactgatgtgctggcaggatgtgggctgcaggggaagaagcaggagaaaagaatagggtctagcaggtggtggtaagtgagagacctgagcttcttagacctgagtccagatgtgatgggttatgtgttacaggcatctttccagctgctgtggagggaacctgatagtaaaagggagtcaagggtagaagcaagaaggttaggctagacttttaccgtaattcaggtgtgatgtggtggtaactttgactagggcatagaagttgggcaggagaggtaagtttggggcatgtttgggagtgatcgtctataggatctcaagtgtgatttccttcagagaaatgctgagctaaatgggcaggaatctgggatactcagagggaaatgaaaataggtgccctagggggttgcccagataagcagctggcgttccaagaccaaagagtatctgtttctcacccctctcccatttagtttctaaccttgagctttgggccagtgcacagaggatggtggcttcctgcctttggcttcccagctgagagctgttggaacgccccaaaataagccctgcagaacgtgcagcttcctttgctctccctgggtatttttgtaaaacattctttcccaccaagaatgaggaacgttcagagtgatgctgactttatgggctgtatttaacatgttgttttttcatggtgttgtctgttcatgcagagatttctgtctcctgtaaactccctggtaaggaatcttcaatctccatgtgagatgggtctggaaggctcagtgggagcccagaagagctggggtttgaaagcctctccttgtcttgaggactggactgcggtccaagggcacctaccagccctcttttttcatttacatttgaattcacagttgctgccctttggcagttccctgtaattccttttaacaggctgggctttcctgcagatacttcatttttcaggtcttggagaagttaggtagtggctgaatcaggtagagaatccaaaattctgaccaagccccatcctctagccaccaggccaaagcaacttagcttgtgacctcatcctcctgtgtatcccctggcaatcttatactataatcagcctaagcccagagatgctcagaaatcatacactaagtcatctaaaactcatttctgaggctttctcatgcgcccctcttgcagtctgtagttaccaggttttcaaataattagcataatctcttaaaaacagtgttttgttattgctcattcaagtttcttctaaaatttcttttatattacctattcattgagttgacaaacatttattgagttcttactgtatgccaggcattgtgctaggtgctggggattgattcaaagataatttggaggcgtatggaaggggagtggataattacagcacagtgagataagtgctataatagggggatatataaagagccagaaatagcactatgaataacatctttgaacaaattgccttcttttttccttttggattattcccttatgtatattgcccaaagtgggattactgggtcatttaaaagatgaaaacaatttggcacaaaaagatgtaatgacttgcctggggaatacagctcaattttcaacagagaaagaaaaaattgttgacaaatccagatttagatcactttaccaggaagatggggcagtttttatactaccctttcaacatggtggcttttaggggcggggtgggggggatttattctaaacatgttagcctgcgtgtaggaatcacacgtcctcatatttaatctcacaacttgattgttctcacaagaacctagctgtatacatattatcgtttccattttacaaatgaagaaactgcacccttgataaaaggaagtaagttgctcaaaattccatagttaataagtgtagaatccaagggtcaagcacagttccttttattctttgactctatcctgttccccatgctgtgtttaccaattgagggtacctgtgctctagccggggcccggaatttaatatttaatgagtcacggaggctcttaagatgatggtcaggctctatgaaataggtgtagattttcttacctctgaagtcatagccagggaacaatgtctttctgtatattgacctgaaaggacccaagggcgcattattcctgaccctggctcaggtgctgaaaggctatttgcatagccctactgttagagcacagaatcccaagtaaagctgaaaccatgccacagttttgctgtgaaacatttattacttttctagtacttaacagtattaagtaaaaactcctgcccctggtatccaggacctgtcataaatggacaccaacatcggtccactgtgggtccatgtgggtccttgatgctcctgcttacatatctttaaatcaaacacatttcctaccaacccccagatatatcttgcactttctcaccttcatgccttagcacatgcctttcctttagcctgagataacctctccaatcttcattcatagaactcccaatcctcctgtaaacttctgcacagacgccatcttgggaagggaataatccttgatcaccacctgctctcccatccattagaagtgatctctgtgttctctgttctgctaactcaaccacagttagctgtgaggcaatagagtacaaatgtatgctgcatatgagcatgggatatggatttgaatcccggctgtgatacttcctcactgtcagttaacttgcttgagcctgagttttcccatctgccagatgggtgtgatacaataggtgctccccctgaaacccaccatgttgacaggagtagtataaaaatggtctgattctcccggtgaggtcacgtaaatctggaatcgtcaacaattttcctttcctttgttgtcatgacttttttttatgacatcacctcatgtcatgtcaccgtgtggtatgaaaatttgcattgttacctgtgcttcttctgtggcacttgtcctcccttacttgatgtcttatctctccttctagactgggagctcttcaagggcagggagggcattgcatctttgaaggccttgacatatggatactgctacaaagtttcctttaagggaaaggaggattccatacaacctaagtggtgacatcagcacaggctcattactaatctcatgtcacgaggtttcaggcctggctgagaactctgtgagctctgtgatgttgagcttcaggcacatagagtacaagctgggtaggcctctggctcctgcttaagagacagcagaaaggctggatggagcctgtctccagaccagcttcttctgattcaaggagttgggtgggactggcagttcactgaaggcagagtggtagtcctgcttggaacgtgaaactttgtttctttcctgggccttccagtgggtctgttatgttggtgagagtttcagacctagaggaaagggtcactgaaggtatgggttaagagcaactctgaaagccacctgccccccgacttctctgtgagtggggccacagggagaagatcccttcataggtagctcccctacccttgctatgcttggaaactgaccatggaaagggattcatttcttaaagggatagggctaccatttaactttctattgtgtcacttcccgaaacgcaacacctatggcttaagatccaagtgctttagaacatgagatacaaggtcttccaggctctggctgccacatccctttccaggcgtgtgtcccaccacattcctctgcatcctctgtcactggcctcaccagattagtcactttctctgagaacaccctgaactcatccttctcaaggcctttgcacattgtgttccctgagcctatttttctcctcctcatccgtggaaatcctcttgggtgttcaggcatcgtttagaagtcacatcatctgcagagaacttttagaccctcaaaaggacgttgcatgtactcgtgcttttctacacttttcattctgtcttttgtgttccagtgtgtcccccattgaggctcttcgacacccctaggcatgtccaactcagcacctacacctgctaggtccacacactgtgttatccaagacagaaggtgttagcaaacctctctttggtgcgcccctgaatgcagaacatgtgacattctgttaactaacagttgtgccagagtggtttccatagcccatactggggttcccatgatttgtttgatcatgagcccggccattcgaattgtttttgaattggtctgatatcagctagttaattgttaacccttttcaggtttgtttcccacataccagtagatgtctgcttagtgccagggttctgagctttttatttcacttaagaatataatagcaaggtagaattcaggaaagatttacttgctgttaatgtgaacttttaaaaaaatagtttgaaatgtaggctttgtttttatcccaaagctccatgaaatatgaaaatagcaggagttttaaaggtatatttccacctctagaggaagaactgtccatattatagttgtaattataaattaataaagcctgtgtcatgaaacttgattttgaacgcctgtgttcaaatcctggctttaccacttactagcctagagatattggatgagtgtctaacttctccgttcctcagtttcttcagtgttcaattgggaaatttttcttatggttgatggaaagtttaaataaggtcttggatatgaaactgggattttattagtgtgtgtgtttcaaaatgtggatttggaggccatttaaaaatagcatttccaaaaagtttgcttttaaagcaaagtacttagatatataaatttttatgaattttttttcaaatgataaaataaatgagtttacagtcaggagacatacagtatctaacaaacttagggaatatgcttggcttacaagacgtggttttagtccacataaattagaatcacagaactataggctttgagaaattataaaagccttggaaggggtgaacgtgaattagtgcatattgtgtgcaggctttgtgccatacgtgctagatatgggatcccaggaaatggttgcatacaccttgttgggtagatgatattaaccctgttttgcagacagagaaacctgagctttgagaaaatcctttacacaagtccaatatcaaagtctggaacttcaaactgcactcctgatggcttctagaaatcctttccatttacagatatgacaagacttgctttcacattgttgattttttttttatcctctctttctctgtctctgggggcagcactaattcagggccagatagaactgtgaaaatctgcagtgttgatgtcacataacttgtttaatgaatctagattagtgtcttgacttttcctgccaagaatctgctcataaagtgtcttgttttgagctcctttaactgtactcattcatcagcctttacttattttcttctcttttggagagatacttgccattgcccataatgtttgaggtcaggagtatatttgaagagggctttatattttcttaaaaaaaatacaggtggaaaatcaagtttatcagctatttcataccatcttcttctgccatttatgggcaacatgtggaagaggtggcagggagctgggagtttggaataatgtgtctcatcttgaatttgtcgctgaccagggaaaatactcaaggccaactccatcattcccttttgggaattcggtgcttcagctgtaaagagtgagggcactactaggtgattcctaagatttaaaattctgcatgttttgtggtgtcaaaaccatcaatttctggtgagctgcgtgatcctgcagctgtttctctgatacttttcaatctttagatttaatctattcaacaatgtataattttttaaagggaagcttttatagatacttctgaactataaccgggtgggggggataaatggatgttaaaaaatagaaaacaaccaattaaatagtatatagcatgtaattctccttggaaacttaccacgaaattgagaagcactttaacaactggtaatttaaattgcgtttgaactctgctaatggtttgtttgcatgggaacttcaatcatttcacagtggttctttagcaaagctgcttgttctctttatggaaaataagaaaaaattattaaaagagaagttggctatggaaaatggagaccactttcatttgtgcctggagggaagctggagagtgtgagtgagactccctcagggccaagggtggagagctcttcctttcagtgaagtttaaaaatctgggaagtcagatgccctttgctgctgttgtagaaactgttgtgatttgtatctctctctgcaaggagaagctttggttttatgcagcttgcgggtgagggtagggacaacctttttcgtttgttttatgaaattgcattgttcacaggtctaatgttggcttcctaacaacccatttctcagtaagtttgaaattatgcctctctctcctttcagtggaaatggctttcagaattccaatgtccttgaagaccactaggtctcaggaaactccttgcttttctgggctgatagtgattatactccattttgcctacttaatttctgtctgctgttgaggttactgggagagcgttgaaataggtgttcgaggcctggatttgtaagtcctggtttggctctaggtgtgactcatgtgaccaagcacaagtccctctgcccagtgtgttttgttgtcctttgtcaaagcaagcagtcacttgatccagtggatcaagtggctcctgaagaggtcacctccttacccaggccaccgggttctcttgtcagttggaaaagttgaggtgggtcatttaaaaaatccctcccaactttgaacttggaattgttttgtacacaaaacaattgtatgattggctaggtaatgtttacagtgacaacaatgaaatgggcatggtagtttctcgtatgtggatttctcctgcatacatgaaagacaagttttataacagcccttgccttgggatacttgtctgttggcatacatactgtgtaatcattagcaaaacaataatagttgctaatgaaataaaacctgtaataagggctgtattaggctattctagcattgccataaagaaatagctgaggctcggtaatctataagaaagaaggtgtaattgggtcatggttctgcagtctgtataagcatggcactggcatctgcttggcttctgggaagacctcagggagcttttactcatggctgaaggcaaaggaggagcaggtgtctcagatggcaaaagcaggagcaagagagggagtaggcagaggagttgccacacacttttaaatgaccagatatcatgagaacacactcgtgatcgtgaggacagcaccaagaggatggtgctaaaccattcatgagaaatccgcccccatcatccaatcacctctgcaggccccacctccaacagcaggtattacaactcaacatgaaattcagaggggacacatatccaaatgatatcaaggacggcttactgggaaatgtcaagattgtttatccctctgctgctcactgattctcacttttcaggcaaggaaactaaagttcaaagaacattaggtcctatagttagaaatttgtctccaaactcatattccttttctttttttatttggtatagtttaggtttatctgttaatttttttcttccctacaatttgagtatctaactgacttgcctctttcacctccattattaagatgaagctgttttcccaggagaactaggagagctgagatatgaacactgaggcatcagcattctctttccccatcattctgagtcaaattagtgaaataagagtgccaggatctgactaggagtttaggaggtatagaagtaaaccacggcccagtcagagactttataagcctgggaatttctgaagctggttaagaccctagagatacataagcaacacccttctgtttttcataggtgggaactttgaggctcagagacagagcagaagacagaacctggtcttctgattccctgtgttctgcttttttcattgttccactggacgctcatcagagggaagatctttttcctcaattggtgagtcccgcacacaaaaagaacacatttgccttttaaaatcaatgtatatgttttaatgagttttaaacatcagtgttttccacttaaagtatgggcatcagtaactaggatgcattaagaataagagaagaactgaaatgcccttccttctttcttgagttgcttttatggcaatagacaatatataaccatgctaataaaatgtgtggcaaagcaaaggcagagctcagctcttggaaggtggtagcattgaacttggaggaaaatttggagtaacgatgatttcaggttgccagcaattgtattgcctccttctttctcatttggcatggaagaaagtgttcatgaaatggaaagaccaaaatgaaaatgtcactgaacagtgtttgggcatttacaaggaaagaaagcagtattattgagtgtctcttgtttgcccttgtgcaaagtgctgcttcttttgtgatctcatttcattttatgtatttatttttttgagatggagtcttgctctgttgcccattctggggtgcagtggtgccatcttggctcactgcaacctccacctcccaggttcaagcgattctcctgcctcagcctcccgagcagctgggactacaggcacataccaccatgcctggctaatttttgtattttcagtagagatggggtttcaccatgatggccaggctggtcttgaactcctgacctcaggtaatccacccgcctcagcctcccaaattgctgggattataggtgtgagccactgcgcccagcctcattttatttctataacaaccctttggggcagagcaggctaaatttgcttaggcaaagggtgtgagcctttgttttaaagggcctgccagagctccaccaggatgtgaggtgcaaatcctgttatgtgctcagaaaggagaattgtgaccaggtaaggtaaactttcccttgtgttttggtgtacctctgtacttaatgggtagagtagaacattatgttctaaaaaatcggggtggtaaaaagaatcaacagtgtggaataccctgggctctaaggaaagctgaggaaattagtaagggaattctgggtgcgacttccacttaggatcctgattcgatggtccccattggctgaggccaattcatatatgcccccagcattggctttgtactgagtaattaatacaccttgacatatttgtggtgtagttttccaaaacagagatgatgccattgtgattgaaaaaaaactaacttcatttaaaagtgtgactgagtttatagatgtgttttgtctctctgtcttttcttaatcagtgtatcttaaaagtacaactgactgtgtgcctattgatctatattacataaaaggctggaaaccactggtttgatgcttaaaccttagtgtctgttaaaatttcaaacatgatctggaatatattccccctagcatacgtttaagtatcaaatgaaaaatctttgtcacctcctctatgtcttgagttttttcagtgtttataattaaactgtgataagtatgaagctttgcacttggacttaaaaaaatcaagtgtgtaatgatagaaagggagagatttccttaacaagagcagactggaagagacttttatttatttattttatttttattttttatttatttattattatttatactttaagttttagggtacctgtgcacaatgtgcaggttagttacatatgtatacatgtgccatgctggtgtgctgcacccactaactcgtcatctagcattaggtatatctcctaatgctatccctcccccctccccccaccccacaacagtccccaaagtgtgatgttccccttcctgtgtccatgtgttctcattgttcagttcccacctatgagcagactggaagagtcttagaagtttttgttgttcataagctaaatatgagccaacagtggcttttgttgggagtggcttccgaaatgctgatgcagccttcacctgcgtttaatagagtatggcatctagaacaaagtgagtgggtgattctgcaaacctagaacacctggaaactggcaagtgcagaggtcatgtgagcctcaggcacagtttgaacaggactctagctctgtttttctgcagcacttcttgctctgcccttttttgtgcctgggcttcatccttggaatgttttacctcatgggccatgagacggctgcctgctgaaacccaaactatagatatccctgttcccatttaggggaaagagcctggtttgctatattctcataggcttggctgactgtatatttctgaaccagtcattgaagccaagagaatgggattatggtaatatgaaccactattctcctgaaactgaatttggacatagtcccatccaaacctcatggtactcacacagtggagaagaggtggccccgcaaaggaatatctgggtgctgttaggagagggagagaggactggaagctccgtgggcaaccacaggccttctgcagacctctttagcccccctgtcagagaccctctagagagccgggctttagttcctgcctcaccttctgaaaaggcatcagccagctgcactgtctacacgaggatgctgagaggaccaggaatgatggccaaccaagaagtgttacgggaatgagaccatggattctgctgcaagattctgggacacacgtgctcatggccatcaagaacatagaacctgggcaggacagggacagcattgcttgttcatgtgtgtgtctccagagtctgctggggtctctggcatgggataggtgctgcatgaattttcatggatagaataaatctgaaggaagtgagggtccctttcccaaagggtgttctatcgggcattggctgactctctgttagggagtataggaattgtagcacagatgaagccagactacgtgatttaatgagaatgaaacaaatgactggacaagctgggcatcgtggctcacatctgtaatccctgtgctttgggaggccatggcaggaagatcgattgaggccaggattttgagaccagcctgggcaatgtggcaagaccctgtctctacaactaaacaaacaaaatcccaaatgactggacagaaagaggcttttgacttaagaagtttgtgagggcataaaaaggcagtgagtatggtgggatgccctaacagaagtcctgacaagtatgagatgtgcaaccctagaaaaacaacatcccttcacccttatttttttgatctgagaattaggaacaataatcattgccctgcctacctctcatgtttgcttagagcaagtgcattgttaaatgccaacctgttttgtaaactataaagtgtggttcctgtatgatacattattacagttgtcttcttccttaaagactcatcttgaatataaagaaaaagacaatgtaagttcagtgcacagcatcgggaacattagacatgctcagcgtatgcccttcctgccaacattgtacctcttcctcctccgggttggatgggcactaactcgtcctcagtcctgcagctagatctgcaactttgcttaatgatgcaggttaaaattgaaatagaattatgtattattatttttcacattcatttttgcctgagacaggaggtggagggtggtaaattaagaaacccgggaagctcagtgcttgagagaacccatagaagctacagtctagcccatttggcttcttactttgttagattagataatcatacctgctgctccaggcgtgactagcccagtgggagtcaggaaggaaattatttccctctgttgataccggtttacaattgccgactgtcgccaagggctttcagttttaatatttcctctttggtcctcagaagtatcaggtattagtctctgccggaagcaaagcattggtcacttccgtcagaggtgaatgtcttggctgtctataattcctcagtcaggtgctttctgggcatgtgtgagcatttgctcagctagcttttattgcttgtatgttatttgcttcaaaaattacaagaggatttgtcgggtctgagcagtgacctatccagtcccctgaaactctatggttcttcgtgtaacccagggatgtcttgtaggaggtatgtttgctgtccacgaaagtaaaaagtagtgatatctctttctctcttttgcttccttcctcctaattccacattctcctatttcttggcttctggcacagtggagatacctctactctacattaggcatggccttaggggatccgaattctcaggtcttcctcaatgagttgctgtgtggtagacagcatctgaagtttgaatgggtagagagacctttgtagattgtggccaaatatttacacctggttcatagagtatgtgtttgctgccctgatctcagtgttggtctgggtgttagtgaacctcatgatctttaggaaactatgtgaattaggcttagtccctgaccctgagaagcttatagttagggaaaaagacaaacatataaaggagaaatacacattagaaacatattcttttttttttttgagatggagtctcattccgttgccaggccagagtgcggtggtgcgatcttggctcactgcaacctccgcctccaggattcaagagattctcttgcctcagctgcccgagtagctgggactacaggtgcgtgccgccacgcccagctaatttttgtatttttagtagagacggggtttcaccacattggccagaatggtcttgatctcctgacctcatgatccatccaccttggccctccaaagtgctgggattacaagaaacatattatttatggtacacatttattaatcaccagatatgtttcaggccttacgctgagtgcttgggaaattgagataaattatagtctcagatctcatggggcgtggatgaagagttgggagaaagaaaaaaataggccaggcgtagtggcttatgcctgtaatcccagcactttgggaggctgaggcaggcagatcacctgaggtcgggagttcaagaccagactgaccaaaatggagaagcctcatctctactagaaatacaaaattagccgggcatgcctctaatcccagctactcgggaggctgaggcaggagaattgcttgaacccaggaggcggaggttgcggtgagccgagatcgcaccattgcactccagcctgggcaacaacagcaaaactctgtctcaaaaaaaaaaaaaaagaaaaaaagcattgattaatattatctcacagtttctgaaatttgggagcagcttggatgggtgccacaagatctctcaccacatcgcagtccaggtgttgctggacctgcagtctcaccggaaggctgaactccggggaagatctacttgctaccaagcacatcgcatgatggttggcaggatttgtttccccacagattattggactgaggacttcagtttcttgccgtgtagggctctctatagggcagctcacatggcagctgccttccctcaaaatgagtgagcaagagagagtccctgagaggcaaatcacagtctttttataagttaatcctggaggtgacacactgttccctctgcctcattctctttacgagaagcgagtcactaggtccaggccacactgaaggggaggggtgaatatgagcacaaggttattaataccaggaggtggagttacacggaaccatcttaggggctgcttaccacagattccccaggtttacatggatgtgctaaggtggaagtggacgttgcctgaagcagttgaataaacccagcacacctctgtggatcaattttacttgaagacatttttgggggaaaactccatttaaaactcttaagagaagcactggtacataatagcacaggatgtaaagttggcatggcttttaagaagaaaaacacaagttttcaattcatgccgtgttcccttacctctgtatttttgccctcctcagcggtagagcttttttggtagaaatgtcgaaaggttcttgcttgagccccttgctgtatgcgtgagacaccgagacttggaaagggcacatactcttccagggccacagagccagcggtagtcaagggaggaaccatctgcagctcctctctgtgccccgccttccaccgctccacacagtctctgctgcataatgagtctgtgcaacttttaggatgttttctcttcttttctcaaactctctcctgtcccagaaacagattaggaaaaataggtcaaaaattggaatcttgagctttgattttgtccctttagttaaatttcaggggtctgcgtctcctggtgggccatgttgtgtcctgaaaagttgcataaatcaatattacacggctcagacagtgtatctctgcagttatgaataacatttgttttaggaacagagagctgatatacaacgttactttgagactgacaagaccagacataaaacctcagccaataccctctgtctggcagggagtttcttttccagagcatccttctcttcccccgaccaaagcagtccttttcaaaatcaagctccgcagtttattttatagaagatgacaggttcccttagagtccacattcacataactagaaaaattaatggaaattggagccttaaaattatggtcaagcttattagtgactttacagccaaaatgaggaacgcacagctttggtcactgagaatgtggctggccagaacgtgaattctactacctgctccatagtccctttcaactctcagcaattttttttaatactcatcttattcttttttttttgagatggagtctcactgttgcccaggatggagtgcaatggtacagctcactgcagcctctgcctccaaggttcaagcgattctcctgccttagcctcccaagtggctgggattacagatgcatgccatcacacccggctatttttttttttttttttttttttgtatttttagtagaggaggtttcaccatgttggttaggctggtcttgaactcttgacctcaagtgatccaccctccttggcctccaaaagtgctgggattacaggtgtgagctgccatgcctggctaactctgcttgttattaaagtgtttcttaccaattatttcatttttattaaaagtacatagtaggaaatagagttttagttggacaaggacaacatggtaaagaggaatttggagtaggaagactgtcacgttagtcactgaatcctacctagttcacttagttttttttagcctgttttcacttctgcaagccatggagtgaagagtgcctacttcagagtctttggtgctctcaaagcagcgtaatgtctataaagtacctattgagtgtggtacttcttatgtagttggcacacattaaatgttaagtttctgatcaccttaagagtccataactctttgctggagatcacccttagttcttttctttgttaggccattatctcatgtcctgtttacactgtccccttggattggcctagacctgcagcgtttgtgtattggtcaccccagatttcatgtttcctgaataattaatagcctcaacatttctaattttgcataatgactcccaaggcctaactacaaacatcataatgtgctcatgttttctgatacctggaaatatagtggctctaggaacaaaacctttatccactgtgtttcatggggaaggcttattgggcatcactactggaaagtaagtgttgattttaatggcaagactagtccaggggtgaattctactcaggtgccattagcaacctcttcatctgtaaatggaagtgtctctgggacctgctcagctctgacctgctttgggtcctttttggacttcttcaggatgagatcacctcaccgtggttcaatgccaactggtttgagttatatcagttattaaaaatgatctaatgttttccttttaaatctgaggccctggctcattctatgattaagccagtgatttatttataatatagtgtgagatggctgcagccactctatgatgtaatctaagaatgacatgaaaacaaaataggtttttacataatgaaagtattcctgtaatacagtttatagcaaggctttttccccccattgagaatggagatatattctttacttttccttctactcctgtttaaatcttcttttaccatttattacacttaaggcctttaagtcaatttttaaaaatcagcatttacaactccacaaagtctctggttactcttttaatcttgtcattttcttcgctcccaatccccactgccaccctccatggcctctgtgtgtagccgctgctcaccccctgctcagcactccagagtcctcaccattcctctgcttatgctgtttcttctgctggaatgctcaccccaatcctaacttttcttctgctaaaggcatacttcactggttcccacaaatagcatccttctgtagcctgctcaaatgcacatcttcctttaagcctcctgtgttgctccttccccttgttagaaacccgttatctgtactcttatggaacttagtgtaatagcaaacccccacccctgctccaagggctattcacagactgtcagagttagggaggagaaatgacttagaggaatggggtaaggggttttgatagttcccggtctgctcctaatagtgagacccgggcagtcagtcatggctcatctttgtggttcagtttttctcagctgaggaatgagtggtttggattttatttcacatggccaaatgatgtgttggtagtggttccttgaggtgctgtgctgagaaggactctgaggctgcatcctgactcagctaatgatcacttaggaatatcgccatgggagtggagagtgaaagcatatgagaggtatctgagctgcttttggactaggtgatttaaatgtctctttttgttctaccttctggatgctttgatttactgacttgtgaagtgtcttgcccaagatcacgtagcccattaagttttagaagctgattctctgacacagagatggttaaaagctacacatttgactctcacattcatacacgtaggctggctgtgggagatgaaaagctagaataagaagttctagaagatccatgacttattgaaaacacaagactactcaaactctgtatgtctttgaggttgagtgaggtcacttttcacctctttgtcttctttgcttcctaggagttatgatgtccccactattcaaatttatgtcaaagatggcagttcaaggtcaaggtcagaaaggcaggtgatcctgccagggtcttaattggatcagccttaccccatgaatccattagatctcctgttccccttcttccaactccagacaaaatgcttagctctctgcaaaaagcccaattgcatgagcagtaggtcagctcagcaaccaggtgattgaacactgggacaagaataaaggaaggaaaggaagagggcattttaggatggctgaaggtgctggaaacttgaaccctagaggaatgaagaaggaactggaagtgcttagtgtaaagaagaaataaaggggcaggaggaggagagagcagagcaggtggtgctgtcctgggtctctgctgtggaacgggtgcaaactcactttttgggacctctggaagagttctggcagcagtgggttggaagcaagagatagatagtgtgagaatgttgatgttttctcaatgtttatggaaaatgcttaatgttttaatattaagagcaaaccacagatggaatgtgtgtttcaggaggtcgaagttcacaatcactgcagatgtctaggtggggttgatgcagttaggtattttctattttaggtattttgtggtggggataaaatgttatacatgatgacttttaaggtcctccctgtcttaagagtctagagtttttttagacatgtttttgtgtacatttaaataatttccattttaaaatgaaggctctttggagtaaagtgattgttcctttctccataatcttggcacatgtaagtgctgacttaccttgggcaatctcttctccacttagcattattgaaggaaaggagactaactgaggatgtcttagaattttttgtactgaatgtatttttgaagatgatttgtacgtttcttttcagggtagttccagggaagtctcttctttaggcctcctccaaccaccatcccctattgtcaatgattggctgtttttgtactaccagaatgctttgtgtatacatccaataaagcattcatgccacttcagtctgctgtataagcctgttttcacaatctttcttctcctctagattgtagaagctccttgagggcatgaattatgtctttttccataggaagtcccatgtcatctagtataatagtttgcaaatagtaataatgatgactcattaactcgagcgtttactgaacacctactatttgctagacactattccaggtgatgggactagaacaaatgttaaaaaaaagacagaaaaattaatgagtaaatatgtaatatttacattgtgatctattaggttggtgcaaaagtaattgtgatttctgccattacttttaatggcaaaagccgcaattacatttacaccaacctaaatatattaagaagaaaaataattgaggttaaaggcatgaagagtagggaggacacaaatgtaaattcactggcctgagaaggtcttgatggtaagagtatatgtgaatggagacctgaatgaaacgaggtagcaagccagagatgtgtgggtgggatggactggaggaagagtgtgtagaactgactgaaagcaaatgcaaataacctgacctgaagcatgctggggacatgccggaaaagtgaagaggacagtgtggctagagtgaagtgtgtaaaagtggtcatgcatgccaaataaaaatagttgcaacaaccagtaagacatacatgagagatattgtgggttcagttgcagaccaccaccgcaataaaacaaatattgcagtgaagcgagtcacacaaaattattggttcccagtgcatatgaaatttatgtttacactatactgtagtctcttaagtgtgaaatagcattatgtctaaaaatacagtatacataccttaattaaaacttttattgctaaaatatgctagcaattatctgaactttcagtgagtcctgcttttgctgatggagggtcttgccatgatgctaatgactactgactgatcagagtggtggttggtgaaagttggggtggctgtggcaatttctgaaagtgagacaacaataaagtttgccacattgattgactctgcagagaaagagtgatatcaagctgtatcacttctctgtagcatgtgataatgcataatatcattttaccttcaagaaaacttctttcaaaattggagtcaggcctctcaaactttggatctgctttatccattaagtttatgaaatatttgatatacttttttttttgttgtcattcaacgatgctcacagcatcttcaccaggggtaatttccatctcaggaaaccattttctctgttcatccataagaagcccctccttatccattcaagtttaaacaaaggattacagcaacacagttgcatcttcattccacttctaattctagttctcttgctattttcaccacatcctcagttatttcctccactggtcttgaaccactcaaagtcacccatgaggattggaataaatttcttccaatctcctgttaatgctgatattttgaccttctcttatgaatcacaaatgttcttaatggcatctagaatggtgaatcctttttagaaagttttcaatttactttgtccgcattcatctgaggaatcattatctatggcagctagagccatatgaaatgtatttttttaaataatcagacttgaaagttgaaattactccttgatccatgggctgcagaatggatgttgtgttagcagacaagaaaacaacattaatctctttgtatatctccatcagagatcttgtgtgaccaggtatgagaagaaatattttgaaaggaatcttttttttttccctcttttctgagcagtaggtaacagtgggcttaaaatattctgtaaaccatgctggaaacagtgctttcatccaggctttgtcattccatttatagagcacaggcagagtagattcagcataattcttaaggaccctaagattttcagaatggtaaatgagcatttgcttcaacttaaagtcaccagccacattagcctctaacaagagagttaccctgtcctttgaagctttgaagccaggtattgatttcttttctctacttctgaaagtcctggatggcatcttctttcaatataagcctgtttcatctacaatgaaaatctgttgtttagtatttaccttcgtcagtgatcttagcttgatcttctggataacttgctgcagcttctccatcagcacttactgcttttccttgcacttttatgttatggagacctagtttttccttaaacctcaggaaccaatctctgctagcttcagatttttcttctgtagtttcctcacttctttttgccttcatagaattgaacagagttagggccttgctctggattaggctttgacttaaagggaattttgtggctggtttgatcttctatccagatcactccaactttcttcatctcagcaataaggttgtttcactttcttatcattcatgtgttcactggaatagcacttttaatttcctttatgaacttttttttttttggtatgcacatcttggctgtttggcacaagaggcctagcttttggcctctcttggcttttgacatgccttcctcactaaacttaaccatttctagcttttgattaaagtgagagatgtgctactcttcctttcacttgaacacttcgaaaccattgtagggttattaattggcctaatttcagtattagtgtgggagatgggagggtccaaggagagacgtgggaatggctggtcagtggagcagtcagaacacacctatttattgatcaagtttgccatctcatatggccatgatttgtgataccccaaaataattatgatagtcacatcgaatatcactgatcacagatcaccataatacatataataataatgaaaaagtttgaaacattgtgatagttaccaaaaggtgacacagagccatgaaatgagcacatgctgttggaaaaattgtacctaaagacttgcttgatacacagctgcctccacaaatcttctatttgtaaaaaacacagtatttgccaactacaataaagtgaagtgcaataaaacaagatatgcctttattagttaagtacacattgaagatgctcaggaaaaaataaattgcttttgtgattcaaagaatccacataaatctaacaaaagaatgacaaaacatatttctgtttttcagctctaagagatgggggcactggatcaggagcaggatggtagtggtgtgcagctttgaacaagtccagttgccgtggggtttccctccatggcagagggctctccactccgtttctctgcccctgcggcaggcacacctgcagggatgcctgggccctgggtgcagatgggcaatcgtaagcctaatcacccattcaggcacacacttacttgttttccacatgcaaatatggcctttttgcggatgaatttaatacagttgttgcttcctcattttatttaaaacaaaacaaatggccaaccatgtcagttgagggtagcaaatagaaacatgagtattatggtctttgctgtttgtgtcgattacacggctgaaaggaatcccaggcaaatcagtcttttctgtgctcaattttatttttactttatatcaccttttcttactatcgctattggttttaacaaaatttttaaagagggctatcacattcctttctcttaatcattttatcaatatttcaggctccttagttctattttgtggtttctacctttgacatttttagtttctgaacttggggcccattgttcaaagaaaggcattatggagtctccaaaagccattggcaggtggtgtctgtgacttccttagcctggaaataaacaaataaacaagcacaaattagaagtctttgccctattactgcactattagtattgattgcgcaacatcatgcaaaaagtcactttaatttatctggcaggtcctatgtaaacaccaatacagtcaagagggcttggatgggtatttgctttcatttctaatgaaatttcaggcctctagggtaggatatcaaaattggtagatcatttgcaatttattttatcccaaacacctcactttacagtcagagaaactgaggcccagagaagtaaaatgagttgctcaaggtctcagagagcaagaaatagagatgggacttgagcacctagatctctggtattgctgtcctgtagttcatggagctggcagatggatacatctgtgacctgggatgatggagagactgctggacccttcagaggatctcatctcaaggtggggtttatgtgtaaatgatatctgtgtgtttcattttcctttcataaactaatttaaaaatccttttggtatcaaattttaagccaaaaagtagtgagggggaacatgggtaggaatagcttacagcttgcctaacaaggttgttgactgcataagagtcaggagttttgggtaagagtgtgtgtgtgtgtgtgtgtgtgtgtgtgtgtgtgagagagagacagagagagaaagaggtaaagaggaacaaatgaagagggagaggtcagattgtttgacagtagcaacttcataggcacagaatttctgagttggaaggaagtcttatacgtactgaatttgactgctttattttgtagggaaggaaactgatgtgcctagagtagttgagagctttattcaaactcattccactgttattgagtagttaggatattagaccagcaacatatttgggtagaaactttcatataaaaaagcgtaatcataactatccaatcatgtcaactagtaaggctgctcaggtgggataacacatcaaccttctttgggattcttccctcagacatggttttggtgggaggagcatggcaagggaggggcgagctccaaatgcagggctgctctgtcctcggcgacctgagcagacacacgagcagagatcagagacactcttagtgaatgaacctccctattggctatattaaagtaatgctctgaaaaagttccgtgtggagagcaaggccagttagggaacattttgtggatcttttatatgtccttaactatatgattcttttatttttaaatgaaaaatgttaagatgttacggggtatgtatgcatagtctaaagtgatgattttagaggtagcaagacagtgagaatgtccctacatgtgaaatgggcacagttttatcagggaagtgtcaatagagggttaatgttccacgtagtggctgcaagaatgataagtggtcatggggatagcctgacactctaggagcagaaggtggtgggtatggatagaactactgatatagcatgaatccaacctgctgttatctgcgcaggcctctctgcagctgtttgccctgaagtacatgctgtacgtttctccagctgatcctgcatgactgggtataaacgcctgtccgctgtgtgctggacagccccagacaccctcggcagcctgctgtgtttgtgtgagacatgctgtgttagggatttaagcatctccctactcgttcctcatctttttctcttctcttccttctaatctcctttcatctttccctttgggggagaaaaagtcatcagagttgtttgaaggttcatttatgttgatttgtttttattttgaagctaatttgtttcctgcttgtatctgtaactgatgtacttcatgtgagaccgtgttataatatacttgagttctccttggccctctgatttcttttctttttttcttttactgaaaaataaaagatttccttctctcttcagacctacagctttctcatctacatggacaacctatttttaaagaatcttcagagagtcgttgactttgttataactactactatatacgtaatttcagatgatagaattgaaaatttaacttgtttttctagaaagagtttattttccctataacttcaaagagtaatggtggggagtaggacattctgaaaataagaagaaacatgtcaaatgaatttctgacttccagctaggcatatggaataaaggtctttattccagtgacctctgctcattggaaaactttgggctggtagatttcatgattctgacgctgtatgtcctcttgagttacagtgagtgatgaggccaaatcgcagggtggatgatgtgctttttttgggctaataggtgttaaggaggcatgctgtcctttggcgttaagacagatcatttcctcagttgggtaatgtttaaggaatccactaaatccttaaatatatggcacacataaggaatgcagagcttttagacactcagccttaacatgggttattttttagcatggctaatggctaaacttgatttctactgggtttgttcaacctatttctaacttataggtaaaagcctgctttttatcctctccatcctcatcacctttttagttgtgtctctgcttgattcttcttgcattcaggtctatattgtattataaaaagaaagagagagacagagagagagagagagaaggaaaagaagaaggaaaaaaaaaccacacacattgaatgggaaggcaggagagtagagctctgaccccagctctgtcatagccacctgtgtgactatttgcaagcattttcatccattcaacaaatacacaccaggtactggagatacaaaactgtgaaagacacggttcttaccctcaccacttacagtcaggagtagagagttaggtacacaaatagaatgtgaaatcacttctcctttctgggtcttcattttacaaatgcaagagccagaactgggccaggtgatcatcaaggtcccttctgaggctaacatgccatcattcatgcaaaattcattaaacatctgataatcacttacctaagtgaaaattagcaaacatttcccctttctccttagtttgtaggggatgatattgaagacgaatgaggcgatgtctacaaaatgctttaataagcaagttggagaaagagattatgtaagtttgaggcattatgattaatgaaaaatgaaaacaagggctgatgttttcagagagagaacagatggttcctttgttcagaatttgagtataaaaaagagaggaagaaaagatacttgctatattgtttaggccctgaatgtgagtaactttaaaatgccaaaacaatctggttaggaaagtcccatagattcaaaatagctcttacagtgatcaaactataattaatataacaaaaaaaagacagaaaaatactaataagaaatgccacagtgacagctgacacaacctgacaaaaactcctatttttacaacaactctagaaacttgattttttctgttctcaggagttataccacactgtaaaacaaactagtgagaaccgatttaaaactgtttctaccgttccccctacccctcaggttattttagtttcccatgactcataaaggaaatcttcaggattcacaagaaattggcaattcttttccatctttgctgttgagtattgataggaaaacagcatagtttggggcaatttaagtagagaacaaacctccgggggcttggggtggtgtctcagaaggccggatctgggaagggcctttgaaaagcttgcacggaaagctgcgaaataaatcgtttctttttctctttctttacgttctaaaatctcgtgatctgtttctacaatacacaggctaattgatgttatccttttggcatgattcttgctgtcctggggtctatcacttgcaggctatgagaatgaggccatagaccaccacactggcagcactgagcaaaaggtgctagacccttctgagttcaggtgctgtgtaactggtgctgtgattggacagggtgactaacctcagtctctctgggtgtaatttcttcactgtggaaagaggaggctaactagaaagttcactctgacactaatctgagttcaggtccacatctttttttttaattaattattttatttttaaaatttttatttttttgagacagagtctcgctctgtcgcgcaggctggagagtagaggcacaatctctgctcaccacaacctccacttcccgggttcaagcgattctcctgcctcagcctcctgagtagcttacaggtgcccgtcaccacgcccggctaatttttgtatttttagtagaggtggggtttcaccgtgttgtgcaggctggtctcgaactcctggccttaagatatctgcctgcctcggcctgccaaagttctgggattatagaagtgagccactgcgcccagcgcacatacaattgtaggaaggctgagaatggcttttaatttgggagcgtttaaaagcaaacatgcttcctcaagacaacagtaacaaaaaattgacatcgttgaggtgggaacttctttaatgctacctgagcctcttgctgaaatggttctatgcagttttgcatagctaggagtggtaagctcattcacagacatggaagaggcagagtgggcttagggagaggcaccagtctagtggtccaacttgggttctgggttccagtcctgcttctgctactaaccccatgagaccttggaatgcccatctctaaggtttctttcagagctgaatcactgtttggtctgtgattcatcaaagcaattagaagactatgcctctccttcaagaccaagactttggtcagaatactccctagggactttctcactgtgtgtggcactcttctctattagacgctttattcattctccattgtattagagtcaaaagtatgattgtttgttgtagaggtgccttttccgtgtcatctctgataatctacccctctctctctgagtaacctaggcttttaaaacacatctcctttggcttaatcacactgcctggtgtctactcagcattatgtgtttgttgtctgccctgaactgtgaactcagccatgtcctgctcatttctgaagcctcagcatgtacatcggtatctggttcatggtagattttcaatgaatctgagtgaatgaatgatggatgaatgattttgtatctccttactaggcatatgttccttgagggcatggaccgtgtctaatgggtggctacctagtgtctcattcttggtccgttgttagtggtgatttttgtcctcttctttgcactcatcattctaggcttgtattagggtaaattgttagcataattctgccttgtttcccaccctgcccccgccttttttttcttttgaaacagagtcttgctctgtcacccaggctggagtgcagtgacacaatcttggctcactgcaacctctgcctcccgggttcaagcaattctcctgcctcagcctcccaagtagctgggattacaggcacccgccactacgcctgactaatttttgtatttttcatagagacagggtttcatcatgttggtcatgctggtctcgaacttctgacctcgtgatctgcctgcctcggcctcccaaagtgctgggattacaggcttgtttgcttttaaacagtttgtgggcagggatggtattttcttatgattctattcctcacagatcctggcccagagccattagcagagaaaattctcagtagatgtttgctgacctaaacttcattccaccacctttgccttccttttgccttttcacctcctcttagaaggtaccttatatgataatgtcacctatgcaataaagaccacaaagtaaatttaataaaatagaaggcatgcttccctcttttctaaccccacacttttttttttttaagatcaaaataacgttgcatttgtgtgtgccctgcttttatttatttatttcttttgtagacacgaggtctcactatgttgcccaggctctctccaactactgagctcggtgatcctcccacctcggccttccaaagtgctaagattataggtgtgagacaccacacccagcccagccctgctttcacaaaaaacaaaataatgatgaatatattgtactaccctcactgttttcatttgtctgtgaatgctttttattttatcaggaaaaggaaaaatttctgtttcttgactgtaattgttgaaatgtattttcaaagttttttactttatttttggactgataccataaaatcgtgtgaaatgatgtgaggattttctaatggagaaatgacttagaatatcccttggatgtcctatctgctttttaattgttttatcatcccagacatgtttctctattcctgtctattcttttatctgtaaaatgaggttattgaactagatgctgtctacaactttttttttttctttcattaacattaaatctctggtacctgagaacattgggatcaggctgatatgtctaggtgtctatttctttggtctacccttcaagtaggaatgaaaacccatagaatttctgtaattatcagcctcaataactttctaaagcctttaggaagcagataccctgcaatttatctcactaatttgtttgtgattaacactctctgccccttctcatatcccaagctcagtgttttgatatttaattacagggaattctttcctcttcatagatgatatagcaattgtatttcatttctcttatctgaaatctctgctgactttccatgtcttatgaatttaaatagtctaaatagggcatgagatcttaaatattccttccagtttctacattttctattcagcaacaacattttccctggaaaagggtgaaagcctgtgagtcccccacagggcaggagcactgaatacacccacattttcctaccatctgacatagatgagacacaaagtagggactcagatgattatttaactgaatcaactggattccttaattctcacaatattatccttcctaatttgtaaatagggaaatggaggcttagtcacacaaaatatcttgttcgaagttactaatcaattaagtaacttaataatttattgacatctgaggcatttctctctttctacagcctcagaccagaaatgatgggatttcagccttcttttcttagagattggtgagccaagacctggagagagaactctggttgtcttaagtcacccagatgaactattaatagaaaaagaattctactcagtcagtacttaaaagcttgacatgtttgtgtggagacctgtgtgtgactgagttcagatcactctaatttcctgggcctcacttgacccatctgtgaaatggggtaatgagctcttttcggcatgaaggcaaggaactgtccagaagacctctggagaattcttcttaccctgagatcaagggttctgtgagtagtacaactcacacccaaagtcttagttgcagggcactttagtgggaaaaaaaaaaaaacgctgaggctatttttagagccttcatctggttatagactagttggtaggagagcaatacctttgaaaagttaagaaatagttttatacactgtgttaaggatgttgtcaaaactaatacttgtgtatgcaaagactttaacatttattaataattttttctatagattggtgaaattggtttgtaatttttgtcatttcacttttgtggaaattgagcaaaagtgagagataaaatgatgtgatcaggctgggtgcgttggctcatgcctgtaatcccagcattttgggaggccaaggtgggcgcctgaggtctggagttcaagaccagcctggtcaacatggtgaaaccctgtttctactaaaaatacaaaaattagctgggcatggtggcacatgcctgtaatcctagctacttgggaggctgaagcaggagaatcgcttgaacttgggaggtggaggttgcagtgagacgagattgcgccattgcactccaggctgggcgacagagtgagactccatctcagaaaaaaaaaaaaaaaaagatgtgatcaatatcaatctaaggacactgtaaagcagcagaggattgacgattttcctaagacttagtggatgtagaagagtttaaaatattctagcctagtggtttgcaaacttggccacatattaaaatcttcagaggaactttatgctacaatgctcatctcagtcacagtgtctgtgggtgagacccaagctcagttacattttaaagctcccgagagtttagaactattgatctagtcttgatttcgtatcaatttctctgatggtatcttgcttgacatcttacttactgggctgcatttttgtgctgtgtctccctgacacccaagtgaaaactgctggatgaaccgaaaattcacccaaacaacgtgaatgtaatggaaactcttgaaaaggcttacaagccttgaagtaaatgttgggcgaagggagcgaaagggttagcgtttttttgcattgggacctgccttctttttatgcttctaggaacgtttaaaaatgagagcaaggaatatatttcattgctttaattgttcaaggtcttttaaaagcgtgtgcaataaaatgccttttaagataactgacctttgtattttaatgctttttggaagggaacaatacctagtgttcagctgcagtataactttatatatatatatatatatatatatatatacagtcagcagagcttgttttggaatcagagggctgagggttttgctgccttcccagatattttacctgtttctgtttcaacatcaagttccattcagttgatgtttcttgacctcataatgtctaacctttatatctttgttttttccctttccaaacttatccaagaaggagacttcaaggcctgattcattaatttttccttctgctgggaactcaggtgtgtggtggaaggcagcacatgtgacctaatctatattttgacaaagaagaaagctccctgccctcccttgcaccagttcgtttggtaatttttaatcccaaaagccactgctaatacgtttttaaaaattgatgctagctattacgttgttagataaagctcatcttccaactctaaacttgctctttctaaaagtgaaataacactcaggttgcaaacatagtgaactggaatttcagaggcttgaactgacctacaaaacttgtaactgtagctctagttatacatccactgtggtcttggacatgtgaggtgtttgtctaccctcaggagttttagaagaagaaattttatggaattgctttccatattaagaaattaaaatagccaggtgctattttaattttacagattcacaactgtaatcccagcacttgggaggccgagcagggaggatagcttgagtccaggagtttgagtggagtggtcaacacagccgagaccccacatctacaaaaaatttaaacattagctggcatggtgactcatgcctatagtctcagctactcaggaggctgaggtgggaggatcgattgggcctgggacatcaaggctgccgtgagctgagattctgccactgggtgactgggcctgggacgtcaaggctgccgtgagctgagattgtgccactgggcgacagagcaagagtgtctcgaaggaaggaaggaaggaaaggaaggagggagagaaagaaagaaaaaaggaaagaaaatatacaaaaatctttgtgtagctctgaaataaatatatatatatgtatgcagtgtatatattatatgaaataaaattgcttgtgcttaatttattttaaaatcatgtttgaaaatagagctaattctcagttactacattttcccctctcctctttctgatggtttttttcttaactttttattgtaaatgattttaaacttatttaaaaagttgcaaaataagcatagtccaatatagccatatacttttactcagattcgtctattgttaacattttatcccattggatttatcatcctcccccttcctccctcccttcctctctttctctgtctacacacacacacacacacacacacacacacacacacacacagtctcccccaccccatatatatatatatatattttttttttttccagaagtatttcagagtaggtcacttatatcattgcctctacccctaagtacagtgtgtatttcttaataataaaaaaaataaagatagtctcatcatattcacagtatggtaatcagcttctgtacatttgacactgattcaatacttcagtctactgtctgtacttctcctttgtcaggtggctcagttctgtccttgaagaaaactgctttttcccattcagtgtacagtccagcctaaggtcaggtagtgcatttagttgtcaagtctctttagtctcctttgatttggaacatttccacagcctttctttatcttttatggcattgacacttttgttctccccctttacaattatagtattcctcattttgtattagtcactggtttcttcatgttttgattcaattatgcattccctgaaggaatattacaaagataatgtgtccctctcagggatcacatctggagtcttatgtgtccatctctccgtcattggggatgttaattttgagcaactgatcaaggcattgtccagtttctccacagtataggtattctttcctttgcaattattaagctatccatggggagacactttattcttgctccttatcaaaatattaccctacattttttcctaaaccagcatttactatgattggtgcaaaattaggattccatgttactactctcttcacattcatcattcagcatcctgcgttctactgtatgcgggagccccttccttctcctccctccctcccgctctctctctctcttttcctctttcttttctttctttctctctttctttctttctttctttctttctttctttctttctttctttctttctttctttctttctgtctttctctttctttctttctctttctttctttctttttctttctttcttttctttttctctttctctctttcttttctttttctttcactctctctctctttctttcttctgtttcccctcccttccttcctcccttcccttcccttcccttcccttcccttcccttcccttcccttcccttcccttccctcccctcccctgccctccccccctgccctcccccccgccctccccccttccctccccttttctttctctctctttctctctctctgtctttttctttctttctctctctctttctctctctctctttctctctattttcctctttctttctttcttttggttatggtcttcaagatttctgtttcaatctttcataattcattcttgctatataattattttggccctcaaattatcccagatttggtcagtgggagctgcatcaagttggctcctgtgtccttgagacatgtccccatcatctttgttgttagcaattgattaattgctggaataaaaagatgttctagtttggtcttgtatattctctgtcccagccatgaagtcaagcatgtcttcattatgtcctcactctttttatgtggagaaagatgttagagaccaatatctgagtgctaggtgtgctcattgctactctggtgccttaacttatagcctctttcaatgactggagctaggaaattttatatataaaaatatatatgtaaacaaaacctacgtgtatatgtttatctgtaaatatatgggtgcatatacaaatatgtatacacaaatactactactattaatttgctaataccacttactacacaaaacaaatctgtgaaaaagagttgaggatttgcttatggtgctcctccttcaacttaaccctgcccaagactgagggtatattgtcaaacgctcttcagggattacctggattagttctttcttcatgtgtctttcccctatatcccaatggtcattatgttcatttaaaatacagttgggttcaaatgcttcagtttgctttgagttttagtttccctccttcccatcctagtttgtttaattttattttttgaatatgtaaaacattaacatgcttccagaagccaaaactaaaccaaaagaagtgccagtctctcagatatttgctccaccttgttattccccacacctcttggaggttttcttggttatctttctggtatttctttttaatcctgatatatatatatatatatatatatatatatatatatatatatatacacacacacacacacatatatcagattatagcgtcagattatctgtgctttccctcctctcagtaaaacctgtaatgccccttcttccccaaacatatatatatatatatatatatatatatatatatatgtttttatatttcctcttctttcttacacaaaagatagcatgttgtatatcttcttttgcactctgatttcgtaaattttttttctttttttttgcactccctctcttcttttcttcttctctccctccctccctttcccccttcttccgtttttttttcctctctctctctcctgctcaaccaatttcctatgcttggacagttggatagttttctgcaatgaataacattatgcatatgtatttccatatcattggatatatttttgggatatattcttagaaatgggtatgctgggttaagagtaaatattttatgaggtactttagttaccaaatttttctctgatggaatgtcccactagcattcccaactacagatgtctgtgaagcttatgaattgttgccaatttgatggatgagaagtggtatctcagtatagttttgatttgcacatgtcctattaggagtaaagttaagcatcttaatgtatttaatgtccatatgtattcattttgtgagttttttgtgagttacctgttcatgtcttttgcccattttaaaattttattttattttttttgggacagagtctctctctgttgcccaggctggagtgcagtggcacgatctcaactcactgcgatctccgcctcccaggttcaagtgattcccctgcctcaacctcccaagtagctgggattgcaggtgcatgtcaccataccaagctaattttttgtatttttcacggagatggggttttgccatgttggccaggctggtctcaaactcctaacctcaagtgatctgcccaccttggcctcccaaagtgctgtgattacaggcgtgagccactgtgctcagtcctttttttttttttttttaaattgggtttttggtctttttttctcaattagaaaggtcttcggaaattagatatattggcctttcatctatgaagtatattacacatatctctcccaatttgtttatcttttgactttgattacagtgttttattttcttttcagtcatataaaatttttatacttatagagacaaatttaagaatcatttcttttattgcttctggactttgttcgtagttagagagcatttcttaacacccgtgttatctgcatgttatcttccagtacctgtatagtttcatttttcacatttagatctttaattcatctgcagtttgtgtgtaacataatgaatggatctaattttacttttttccaaatggttatctgctgtctcaacaccatttagtatgaaaatatcttctcatacttcccgtgtgatttgagattggtggttactttttaacctacaccatgactaggtgtgaaggagaatgatggtaaacagtggaacagggtagttagaggaaaatgaggtcccaggtagataatgactgaaacccaataagaacatacatatttttgacttcaacacagagctctttaccttttacaagtcatcctctctggtccatttttgtcaaaaattaacgtatttaatagagaaggtgtttaaaacaaaaggagggtttagagattatctgtgctttccctcccctcagtaaaacctgtaatgccccttcttccccaaataaattatgagaatggggctgcataaattttctgtgagcatgtgtgactatgtttcctctggttcctcgccgcatggtaattactctgtgctctctcctgcaaactgcccatgtttcactgcttgtaggtcaaagctgtattgagtaagaagtgaatttgggaagttttgcaagtaaagtgctacctgagtcagtgactgtgtcttaattcacctttttgcttccaggttcttgctcagggccatctgtgcacatggttttcactcaataagtgcctcatgaattttaatgactacacattaaactaaaacaaggtctgcccacctattcttaagaaattaaactctacaaatgatgtattccaaaactgcaaaagagagtgaaagccaaaacagatgaagctgtccttatatgggcaggaaaaactcagtaagattttatcagttcagtaggtgttgcatatggtgatttggaactgtctgccagttccaagatggccttactttattgtatggtcagtacagtttgtatctagtcctcatcaggttaggcctggaactccccaacccctgttaaaaacagcaaatcagggtttctgtggtggaatggggaggaaactggcttgcattaattgatgtataaggtagcccatgataaactcaatgccacttttatacacatctgggagcaagagcttttggttaattggcttgcctatgtttttgctctgccttggatgctacagaaatggaattgtttgttagagtcgttgcatggtgaaggaaaaatcagagccaaggttttgaaggacctaagggagaacattctgtgttctgcaggcatcttcctccttgggacacaaacagctccctgcctaccacacacagtggataggattccttcaatgcctctcctcgggtgaaagatgtggcatgtggaactgaacgatcaaaatcactggggcaactgtatgggcgccctcctgcagtgtaacatcctaacaggacttttgacaggaatggatacctaaatatttacactcctggaggcctcgtctgtctcaaccatacttaccagtcaccacagtgtctcctttctctgtgtagtactggataaatacagataaattctacaccctgacttactcctacctcatgcaaggaagttataaaatgtttgagtagcttacttaagtattactcctgccatggcttcttgacatgccttgatggagctgtggaaagcatcttggttgcttcaacacaaggctgtgagttgtttcatagggcagggtactaactatagtttgctgaccttatccactgtgtggattcatcttgggaaaggagcagagaaggtactgagaataccacatctgctgaagactctgctggatgctttctccagacatctcatacagtcttttcaacacccactcaagatataggagctgttccatttcacagacgaggaaacggaggctcagagactttgcattagtctaccaggtcataaagctagtgttcacagaactgagactcaaaaccaggtctgtatacccatgaaattggtgcttttcctctatgcctgacacatgacacatcatatcaaggcatcaccttttcttgaatcttattcatagattctgggcaagcagcctcagcttggtcctatgaaacctttcctgacctcctccacacaccccctacacacactctgtgaacattgtaatggttagttgtatacacagttgtttccagtgctggactgtgagttcttctggatgtcttcctatagtgtttaattcatagctggcttttgatacgtatgtaatgaaaattctggttttctgcaccatactgtgtttccatgctgacactaaaaatctagacatgctttcttagaattaggcaacccatttacctttaaggatgcactgactttggtttttgccttaatatttggccaaaacctgctctttgagttcgacctctgctttgcctttaggagggtaaagtagccaaatacctacctcattaacattgtaggcaactctgaaattttgcaggataatcattgcattgatgcgaacatcacactggttaccgtcataccgtatcagcataaaaatgttggcaatgaatacgtatatttttcaaatttgttgttaataaccagatatgtacttttaaatatagtgagcattttacttataacttggaatggaaaaccttcttaaactactttgtacgctgagactccaccaactaattgaaatataaaggaatatattatattaagagtaagatgctacaatatttaatgatgactgtgaaagctaataatgtatgggttaaataattaagaactttcaaatagttaaacaagtagggaaattagttggtaattaatataaaaattagattaattaaaccttagttaatgaatattagctaattgaggttattaaatcttagttattacagtttgttagctagataactttgggttgaccaacacatcttttttcagctaacaagcatttataaaaatataaattgtaatctaagtattgttatagaactagattatacaataattataattgttactgggttgtttgtggaatgcatttatgacaccaaacagaatgaccattaagaaccatttttaacttttagttatttaattacacttaaggtcatcagtctttcaagaaaaagcctatttaagattttttttcacattttctgaagataaattaaaagtagagtgtctacactgtctctcaacatttcctgatcaggaaaacctcccaaattacgtatagcaacatcaatgataaatgatttttaacacagagaaatttcatgtgtattcttatatcacaaaaattcagacgatgataatgagagatttcagtctcagctttggcttactattgattttaacattcagtcatttggcacttggcccaagtgggtaatgggtgcatatctatcagtggctcttcatacatttgtgcagggaggtacacatgcatacgtgtgggtgtttcaaagtctaactggaataggcctctcacatttatctcctattaatttgcagattgtttccatggtcaccatccagaaatttcccagtaatccttgaggaagttagggagtgtgataccattagggagagggaatatgtggcatagagacgtgatgggcattagttgtctgaggttatgaggtcgtggtgaagcctgatcatgtgaccccatctccatactctatgtccagtgctccagatcccatagacctgaatcttagttctggtgctagaactgtccctgatgcacatatagtaagactttaatttccattttccctgtcttatgaaaagaagtgttgataagctcattaattagctttctgctcatagcttttttctgactgctaatgacttcttgaggatgggcaggctttgatgagctgtgtggtcctgggaaagccttggtgtcctcttttacctgcacagtgagggtgacggtcgtgttacctcctgaggccacctttcagctttgccattctgtcatttgacaaagactgaatagagaaaagacaagatttaacgacagttaaagtccaagccagtttgtatttgctgaaagacacaactgagggaaaggaactgacatgtagtttaaacagactggttttttgttgacatgggaagtgtgaataatacttcttcctggtttatgagatatgaaattggttgtctaccttatctgtttctcacttttgttctcagttcatagtttggtcatggaatgcaattttgaagacaacttcaagttgtttttttgctcagtaatcatagtagtatttactgttgttcactgggcacccagtctgtgtacacacatcattcctaatcttagaagaaaaacaacgtgcaagacatgtgttttctttcccactttgcaaataaggaactggggctcaaagagattaaaagacttacttaagttcaattagaaagtggcagagccaggattcaaatgttggtttgcctaactgcaaagcctatatccaccttccacccagtgctgctacagcattaaagcctgtaaattgaattccacacactcctactttcacctgtactattacagtgataagtaaaaccagcgctgagccctactaacaaggtgtccttgatttgtgtgctgatgctcatgacacttctgtgtggcatctgctgacaggcccacggggcccagatgttcccactacaaagagctcatcctggactccccaaccagggaaagagacctgaaaaggaactggtttgtgattagggattattgtgatacttgaagtgaatggtcagtcagttcttcccatttatttgagttcttacttcccttccctttgaacatttcagtcaaacttctaacagtgactttcaacactggctgcgcattaaaatcacttggggaggttttgttttgttttgttttgagacagcgtctccctctgtcatccaggctggaatgcagtggcatgattatggttcactgtagctgcaaccttctaggctcaatcaaccctcctacttcagccttgtgagtagctgggaatacagggacacgccactacgcctggctaattcgtatattttgtagagacagggtttcactatgttgcctaggctggtctcgaactcctgggcacaagtgattctcccaccttggcctcccaaagtgctggaatcatggagctttttgtttgtaagcatgtcagccctcaccttccagagatcttgatttgaatgggctaggttggggttctcgctattagcgcaaaaaaaagtaagtactgaagggattctaagattcgtctagagaagacgatcaccgcattagggggcagaaagtccacttttcattattttgttggtacagtatactttttttctgactctatgaaccctcaatcttatgatgttaccattccattgaagggtgggatttattcactgagaacatttatatttttttgagatgtcttaggctgtggagagggtgttacagggatggacacagatgctgaatttagtggccccagagaagaggaattaaccactttggattggattattgggagcaaccaaaagtcagtgctgtggcttttgctgtcttcccttgtaatctcttcccctcaccagattttcaacacagaaggggtgtattttctagttatggggtattcacaatcacatctaataattttactccagaacatactatggcttgtttatactagcttgaatatttgtagtctctttgatttttgtttgctaatttaatttactattgcatataaaagaatggcttccatggagataatcaccgtggctcccagagtgcatccagagacatttgccttgcttctgtggaaatacacccaaattccccagcatgacattgagtgttcaccccacacctgacaccagtctctcttgctctaattaaggccactctttaccattcttgggcaccagccagatgaactataccctggtgtgggatctgcccgatcctgctgagacattaactctgtcctgaagctgtttgtccttccagcagctagaaataatctttcctttcctagaacttccacactgcattgagcaggaacacttgtagaacttctcacattgtacctcaaggtattcttatttatgcatgtatataatttctccccttctactactgtaagcttctgcagggtggggcagcctcttcttaattttgatatctactgctgtgccaagaatattgtaggcatttcctaaattatttttcccccagtgtatgtgttactttgttcaattcagcagttgtccaaagctaatctcttgagctattggtagctttggtgaacatttggagaggactactgtgatggcgtaaaatccggtgacctagttacagaatatcccctgcaggctcactggtaaggaaggctcatgtttaaactcagtgaaaggagagcctggcttatttatggtggtggttgtttacatgtctttaaatgaccttcttttttttttaatataaaggcaatatattctcatagaaaattcagaaactgtaaacagggttaaagaagaaaataaaaatcaacactatcactttcacctatttattattcttattttatttatttatttatttatttttaaggcagagtctctttctgtcacccaggcagtggcacgatctcggctgactgcaacccctgcctcccaggttcaagcgattctcctgccttagcctcccaagtagctaggattacaggcatgcaccaccaccaagtccggctaatttttgtatttttggtagagacagggtttcaccatgttggccagactggtcttgaactcttgacctcaagtgatccgcctgccttggcctcacaaagtgctgggattagaggcgtgagccactgtgcctggccacttccacctattattaatgaaacctgtcctatttaacaaaaacgataatgtggggtgtcttgtgcttggagcttggagaaaggaatttgcctctgtttttttaatgacttatggcaaggccagtatgaccagtaagtgggctgtttattattattattattattaatcaccattgtcactgatagaaattgtcactattgtcactgatagaaaccaagatagaaattgtcactattgctatagccccaagaaggacctcatggctgcataacgattgagcaccttatatttacacaatgcttggttgttgttttttaaggcaactgtgactcaacaacagctgtttgagaacagctccatcccagatgaaatcagaggaaccgaagtttaaaaagaaagtgtttctgggctgggcgcggtggttcacgcctgtaatcccagcactttgggaggctgaggcgggcagatggtttgaggtcaggagtttgagagcagcctgaccaacttggtgaaaccctgtctctactaaaaatacaaaaaaattagcagggcgtggtggtgcatgcctgtagtcccagctactcaggaggctgagtcaggagaatcccgtagtcccagctactcaggaggctgtcaggagaatcccttgaacccgggaggcggaggttgcagtgagctgagatagtgtcactgcactccagcctgggccacagagcgagactccatgttaaaaaaagaaatgtttctgagcactaaagacaatttgaacaaggcagaaaagtacaaataggaaaacaataatcttactagattgtttgtttttgagacagcatctccctttgtcatccaggctggaatgcagcagcacgattatggctcactgtagctgcgaacttctgggctcaatcaaccctcccacctcagccttctaagtagctgggactattctgtagtgataatccttgttaaagttttggaaaataccttttttagagtctctctttctctctacacagacacacacacacacatacacacatgcaacttttatgtgaatgacggcatttacaatttacgtaaattactgcaggtgctatcatttatttttttcactcagcaatatgccttgaaaaaattttaagtcaatcaacatacagatatttgtcatcttttaaatagctatagattttcgctcagactcaaagtctaatttttaaagaagtgactgttatatttaaatcatatatagcttcatgatgaaaaaaggaaaaacaattcttgggaccggacatggtggctcatgcctgtaattccagcagtttgggagaccaaggtaggagaattgcttgaggtcaaaggtttgagaccagcctgggcaacacagtgagaccctgtctctccaaaaaaaaaaaaaatatatattagctagatgtggtggcacatatctgtagtcctacccactcaggaggctgaggaggtgggaggatcgcttgaacccaggagtttaaggctgcagtgagctagaacggtgccattgcacttcagcttgggtcacagagtgcaactctgtctataaaacaaagacaaaagcaccacagttcgttagatataactgaatattatcttcatttcctactgtagtggttcttagaaaggttgtttcttaagttagaaactgttgcctaagtatttaggatgtggcaggcactgtgctacatgctggggttgacgaatgcatgggattcggctctctcccaggctggtgggaagaggacacatctagaagccagggtatataccccgaaggggtttgaggcagtgcagagttgatgatgatggtctccagcctgcctttcctttacaaaaatgaggagactgcatctcacattgccaacgagctgcttgactctaccgatattccctaccaagcacgattatgggtagtcttaaaattcttaataataaaatagatattgaaaatagtgtttttttttttaacagtgaaagtaatatgtactcatgtataggttttcaatatacaggaaactataaaatgaaaaggattgtacctgtaatcccaccccttacagctaactactgtgacattttatttgtagaagtccattttgctatcagacctcaagttttaaaatcttaactcaccctctgtaacctagttctcagctctattttatgtaacgtttttaaaggattcaagatttaaaataaacttatctcaccccaaatgcacttgtatatttttgacaccccctcatctctctctctctcttgtctctctctcttctctgtctctcactctatctcagttctctttctcctcttctttctctctctcctctctcctctctctgtctttctctctctgtctcacacacacacacggggaaaaaaaatcactcgagttaagaatcagtctctcattttacagataggaaaactgaaatctagaacttgtctgaaatcatgttaaaaaaaaaaaagtggtaatctgtgctcgaacccaggtctcctgaattttcgttcagtgctttttccattctacagtgatgcctccttactaggtcatagaaacagtggcagagggagaaaaggaaaaatacgtcagctccaaagagtgcagtttttttttttctgtgtcctttagctgagctatttttgtgactattcagtacatgtacaatgctgcctcttggagtgttccggctagactaagaggccattcactgctgactgcagccatgccatccctccatggaatcctcggcccggaaatcagatgggaacaaactattccaatatacaaatcaaatttcagagtctgagtgtacacagaaaaattactggatatcctgttggactatgtacataacaatgacacagtgatttatgagggtatgatggggcagagggtagcgggtgatgttggagttgattcatcacttaagcgctaatccattcaccagctccagtcagacttcaacacaaatgccaaattattcatcttccctaaatccaaccctattattttctctctcaaaaccttcagttgcttccttttgcatatggaagagagcgtggactcctccatctggcatttaaggctttctatgatctgtcctcccagacattgataggctgtggagatacagtaaggtagttgttatgagccacaccttgcagccaggctgctccagcaccaagcaacactttccccgggaggttgctgcacctccctgctcctcactttcctcatttgtggaataggaatagggtcattgtgagaattaaataagttaatatttgtaaagggtttaacagtgactagctcataatccgtcacgtagaaagttttttcttagctcatttaataagtacctttctaacccatcactgatagcatttttcttttgcaccagacttctttctagtcattgctgggagcgtcctctcattttcctgcctccctgtagctgtcactctcactcctaaactgttggcgttctcattttggcttgcccaaatcttacgcattcttttaagtccatgttcaagtgaatcctcactgattttgttcttcattcatccccttaacagacttttatggagggtctactgtgtgcaaggtgtattatgtaggaagccttccacagttcccagagctaggtgagctctgtcatgtaggcctgtcttgtacatatcaccttcgacattgctgagcagtttgtgttggacatgtttgatctcctcccctagaatataaacagctggagagtaggatgcttattagtaggtgcttattaagctttctttaaaatgagtaagtgcacatgctaccttttatagatctgttaccttctaatgaaggcaagaacaataggaacaaacattagttttgtgtgtgtgtgtgagagagagagagacagagagggagagagaaagagagagagagattttgaatgggaataattatgaggccacatctgagggcaaataaccacttccaagttgaagaaaggcaaggagaagacaggaatgagaggagagctgtagcagtcaaaggaaacgggatgagaatatgttattctctgaatcataaagcatttgctctgagaaatgtttttccttaagtggtataaaatgtaaaatgaattgggtcttagtttttcttttcctctttaggaggttggagctgatttttaaaatgaggtaggggagggaggtggggtttggagaaagaaagtgaaaattgttttctgaaactctgtttgtcaaataactctctggagagaaagttcagagggtgagggcctgccaaagctgaccagcagcacacaggccaaatcgttctttcgtcattgtcctggtcacttccccacccctgttcgccacccccaaacaccttttttcttctctctctctctctctgtgtgtgtctctctctctttcttttctttccttttttttctttttataacatatgaatattataagtaagtagctggagaaaataaaaaagcaaaacaaaacacaaagtaagcagatgatttcaacctgcaattatttgtcaggtcataaaaatgatgtgtcttagatttatttacctgatctcctcatctgttttccactggaagccttctgctcgcgtcacccttcttcatttagttccccaaacttccacccactttctgactcaaagcaggagagaagcattgaacaaaaccactggatttggagaagagagaaaagcagcttttaagaactgactttagaggtttagcacgaattaaattcctggtcttttctttctgcagatttttcagctattgttgttgtttgttttgttttgttttgttttatgtttcttgagtttatcgctaaagatgcttttccgtggatggcacaaaagttcagctatggccatgtgcttactgaaggcctgtatatggaggcatcacagtggctggccttgaagaaattaagatagtgaaagaggacccctgtctgcgaagaaagagctcatgtttgtgtgtgtgctcatgctttgggtgctacaaggagactggtgtctggggaagggaggaagggtgatggttacaggtataggtaaataagttttccaacagttaacaatacttggagacaagctacagagtgatcaatgctagagttaggaacgctgtgagaaggcaaggtgttctgtttgtgccattggggagggctttgctgtggggattgggggaaggatattgttttaggctttgctagatggctaggactttaacaaataagaaagaaagagctgagtctttaagacagagggaatagcagagacatgaaaatatctagagagattgggagtgggaggctgagtctggaggtgagatatctgtatccaatcagagaagtttcctatgccttcctgtaatgttggaggcttcttttttttttggtaatcagtaaggagctgtcatgggctttgtaaaagggctgtgataggattactctggtgtgtgtgtgtgtgtgtgtgtgtgtgtgtgtgtatgtgttttgcttttactttatacatttcagagtctttttaggaactcttaggcaaccttaactctggggagtgtgcattgcctgtctttatatgtctttacttctctgttgctgcctggttctgctccttctcatgcttctgtaacaaagtgcggcaatgcaggcttctagaaggtgatgtgagatctctgagcagaccatgtgtgtgttcttcccatccttttttcccctccctttctcttcctcctcctctttctatatcaccaccctcaccagcagcagcagcagcactcccctccctaaaataaataaaccagtcactccaaaggttccaagcacattagtcacatatcccagaagtttaatacagaattattttgacagcgagaacaagaagtgttttctagttgaacgcacagaacttgcttattccaactgggctttctgccgcacagacagatgatacgttttttagatggattggccgcacagcgcaggagactgtcgcttcccttggatacacagcaaactgctcactaccaaaagtggctggggagaagatgtgaaaggagagagagagagcgcgagagagacagaagagaagaggagaggggaggggaggggaggagaggagagacggggaagacagagagagagagagagagagaaaggaaatcaagttcttattatgtacataactttctcattaatggcttccataagtcactgagagatttctttgtgtttatttatttatttggctgctttggagccatgagtccttttttaaacccgggtttatgtctgttctaaaaaatgaggacagatcgagttattgccatgcgggtggctctccaagcattccagttgcatagctcttccagaaatatttcttgacgcacttatttagcactttctattgccgttactgagcagattacagaatcctcccggccctttcaccaaacccgtctagagctggtatggatctacttgtgcctatctggcagatagaaagatagaggaatgggaaggtgaagtccattgttactcatgaaggattttgaccagtaacctcagaagagtcagaagaagagaaaaagcatgtgctctcctctttcctgctttgcttttctgcttccaagtccctcctccaagcaggaagatctttcctgagcagcagcgtacctgggtgtgagaacccagagggagtgtggtggagagacgtgaaggggtcagttcctggaacattctgttccctctagctcccatgatcattgacttcttgcctctcaagtccttctagggatctccaggcttttgagaggctcagctgacctcgctcactgctgtgcatgctctctggagctttcttgtcctcttttggttgtttcttactagcccctcattcccaggactttttctgaggaatctctgttagttcaggtaataactggctgtgaaacctacaatagtaagttctttggatgtcggtgttttcagatgtttcttcttcatggaaactctttataaatccctcacaaaatgggatgtcaaatctcaatatgtaaaataatcaaagtgcagttaaatggtggtgctgttgttaaaaggtggaagatctcataggcttctagccagggccgagttatctccccagaagagctctgtgcctctgtggacccacttagtaagccattgtactggagttgctttaaggctccctacagccctgatgacctgtgctcagcattctttcagctttctgcctctttgtatatctttcaagcttgagaaagatcctctatagatcaggaagatgtgtccagtaagagatttgacctttgctggtttcttgacatgggctttgatgaaacccttttagcatgctcactttagatgattcttctcaagggggatgtcagccccaggaccccccagacctccatccctaaacccgggcttgcgtgtctggcaacccagggccagcacttcgttcttacactcagctgagtggtagtcctgccaccattgctgtggctctgggactatagcctctgccttaggaacacttatgagaggaatcgatggaattccaactatttttaaggatttttttttttttttttttttttgctgagtttgcattgcaaaaggaaggtagagcacgggccatctctccctcctccacttatatttattctgcacctacctgcacgtgacactctgctattcttcagagaaggttctgacctttgtgaccacgctttacattttcacattgcaaggcaatttctaaagagcttttcccagctaagatctcatttgagcctcacaacaactctggggcaaaggagactgtaaaacaaacaaaaacaaaaacaaaaaaaacaaaaacacaaaaccaaaacaaaaaacaacccccaaaaaccttagacaaatctaattccacagtttaattaagcaaagaacaattcgtgaattgggcaggccccaaaccagataatctggcactgccatttggttgaagaacatttgtggacagaacaaagaaggtgacggacagaaaacacaagtgaggtacagaaacagctggactggttacagcttggtgttttccttatttgaataggtttgaacagttggctgtctttgattggctgaaactctgtgaatggtacaagagtaggttgcatcctgtttacacatcctgttaggacggaggaggcagctttaggctaaacgtaatttaacaagattcaatgagattatacctgtacgcccaagttcacagttaggtagagaaggattgtggggatttgaagcttaggcttactgacttacgccattgtgccatatcattcattctcctcgtggcaggaataatgaatgaatattctattaacaggtactacctattaaccgcttacatatatttcaaatgttactaggtagatactttttacaggcctatttcatcttctcaacaaccctataaggtagaaattattatgtccagtttgttgatgaatggctagaaatatagagaagataaataacttgctcaaggttatacttcacagaattgatggacctcgaattctaattaagattgctgcctccaggggtctatcagtataggatgtgatctttacccatcctgagtcctaggagatataaaacatgctgttgaaataacaaagctggtttgtgggtgatcatatactatagtaaatacgacatactgttaagggttaataggtggctgttttctgtgtttgttcctggagatcgtaatatctttatgctgttccttctacttcctttttcaattttatgagctccatgttgaaattatgagtccttaaccctattgaactgtgtgccattgggcaagttgtttctatttctggggtattgatttccccgtctcaaaataaatatcttttcctgctccgatcattctttccttttaagtattacctggctggtgaatgtttatattgaattctctttgtacaattcctttcaacaatattgcttggaattataaaaacttaataattgttttaaattgaaatgacaattgcaggttatccttgctttcaaaaagattttgtttctgaaatgtagcttgttaaaagtttggaaataaagcatcacatgaagaaataaagttatatcaagaaagatgcctaacacatgttctgattggctagctggttgtgcctttttttttatgtgtgtgtgtgtgtgtgtgtgtgtgtgtgtgtgtcactctgtctcccaggctggagtgcagtggtgcgatctcggctcactgcaacctccgcctcctgggttcaagcgattttcctgcctcaggcttcccagtagctggtactacaggcgcgtgccaccacgccctaatttttgtatttttagtagagacgaggtttcaccatgttggccaggctggtcttgaattcctgacctcaagtgatccacccaccttggcctcccaaagtgctgggattacaggtgggagccactacacctggccgtgccttgttttttagtatcagttttttcttttcttttcttttcttatcgtttcttttcttttcttttctttagggtatgattctatttatttgaagttccagaaaaagcaaaactaatctgtggtaatagaaaatcagagtatagtggttgttcgcaggaaagaggtggtatgagattgcctgagaataggcaaaagagaacttttcagagtgacaaaagtattctgcatctttgataggagcacggattacttagatgctttcctttttctcaactggcctaagtttctttttctttctaatgcttgtataagaacaaccttcgttcccaaacacacagacgtgtgtgtgtggacacacacacacacacaaacaattcttcagaaagaaagcctcttacgtgtgttaaacttgccacttttttctcaaaatgtgctttgtatttctttgggtgagcaaaagaagaatcttcctcttctcaagttcagagtttgaatcaattcttcctgtcttttgcatttcagtaaatgtttcctagatggattcatcggttttccagtaaagacaaacagctcagaagccagattacattcatacccaaggcctgagttctgtgacccaggcatcagagctcagtgccatatatggcgaaaagaggaacaggagcaggagtggagggagaatgccagacatgcaatgcattcctcagaaatgtgcattcataactggcaaaacaggacccttgctggtttccatcttatgcagaacatgaactgtgaagttttgagaaagaagctaatgttccaagcatctgccacagggaacagtttattttcccttttctttttggtcacatgtcggtttaatttggagtcagtgtttaagtcaatgctggcatggggtgaagactaagaaattgttcttgcagtcagcagacatgggttctcagcccaactccactgccacccagctgcaaaactctccttggcttgtttttaatcaatggcaaagtagcagggttgaatttgatgatcttcgagatttctactatttctgttttctttggttctaattttgcccgagattttccagttcctgtggaattccccagtgaaagcattttctaattcttccaaatactttttgtggcttgaacttaaaaagacaaaaacaaaaatcccagtcttgaatttttctttgtgatttcctgaagtatgttttggatgcattatgaatcttcaattgacagattatttcttgctcggggtagagaagaatgcatttcctgcatcttcatggtcttctttcacttgcccctcttattgttggagaagaaatgtaggtatgttcaacacatagttgcagggacagctgtgcactaagcaaatgcagacttttaatgaccttgatagttgtctgcttctctcatgcattgaagccttttctgtggaagaagtgggagcagcagaaggcagattccacagcttcctcacacctcaagagacggaattagggatgtgagactgaggtgttggtttcccagtcagtaatcggatgagacactttgctgtcacagatgttaagaaggttaacaagaaatagaattgtaaaactctggccctaaggtggactacggtcactttcactttgagataaggcatgattttaaatgctcctattggtctttatgggttctgtagtctattttcaacagactaaaattgtcttgttgcaaaagtttgcaattttctgcttctttgggagagggttcaaaccaaagttgtcctcttccctttctcttctgaaaggatgacgttagtttctcagctgaaataaaggaaggaggaagtttccattgggtcttaggaaaatattccagcattgggctttaatggcagctgatgtcccaaacttgtgcacaatggctccgagaaggccatagtggtttaagaggcacccataatagtcccttttattcatgctgagaatgaagaaccaggggcaacactaaagaaacctgcacttggcttttccttgctgcttgtggtccctttcctggaagctgctataacacagccaccaagtcctgggaggaagagaaggaggggattaattcttatgatgcagggggatggctccagagagagtggaagcaaagacatctgtgttctgatgacagctgtgccacgagtttgctctgtgacttggtcaagatgctttgcaatttgaggccttcatttctccgtctggcaagtggacatgctagtggaccttgaaggcctcttctagctcttaaaagcatgaatttaatatatttccagattgtctgtttatgtttcctattgcatgtacttggtatgcccggtgacactgagctcatcaacttgtaaaaagaccgtgccattatcttctttaacggcaaacagaacaaaaacagaatcctctttgtgggtgcctgctcaccgtaatattaggaccaaattcttttgtgtaacattcacctcctttcccagtctagttccacctaacggttctagtttttgggaagcgtttgcttccatgtgtgacattcatctttactttgagctctctgtgagccttttgctactgcagaggtatgtgtctgttgaaagagaggaagctgtacacgatgacacggcagagtcattgggtcaggagtggtgttgagaagaatgaatcaggatgctggggttctgtgatagactctacaaatagtttacaagaagatttagggacagtaagcacaatacatcttttgcttcagtcaaaagcataaattttaatggttacaaatgcctggtgctattatgagaaaaccacaggaaagaccattatataaacagtaataatttgttgactatgactaatcctttggggagtatgatatgtgacataggcgtataagggctttatgtagactaacccctttaacacctattaacttgttagaccctgctaatgggtccacgagggtggcaggctaaggaatgctaccctctatttactaacgagcaaagcgatgctgaaatacagtgaagaagctgtccagtgtcacatggtgaagagatggcataacagagactcgttcagtgcttttatgcctgcgtcgtgttttctgcctttccaggcttcagcctacccagtaaagcaggataaaaacacacaataactgcccccaccacccacagccagaagatggtagaggatgggattgaattagtcatgaatcatgtgaaccatagtatttggtgaatcagtcttggtaattggtggggtgatatgtcagtcagtttactttcacaactgaattatcaactagggcaccacgatggaaaacagaattgaggatttctactttcttattattcatttgtacgtgtgtactttcacttatttaaggcaatgaagaactaataatacctaatatggtgccaggctttgtagtagatgctgacctgtagaagtgaaccataaaccctaagccaagggctataaaatactttaaaattcatgtagaatcctctctcaatcttacccccctttcatttttcagtgtgttctctgatacttttgtacttttgccaggtgataagtccaccttgacttggctattttatatctttttttttttttttttttttttgagacggagtttcactcttgttgcccaggctggagttcaatggcacgatctcggcttactgcaacctccacctcctgggttcaagcgattctcgtgcctcagcctccctagtagctggggttacaggtgcacgccaccacacccagttattttttgtatttttagtagagatggggtttcaccatgttggccagactggtctcaaactcttgacctcaggtgatccacctgcctcggcctcccaaagtgctggattacaagtgtgagccaccatgtctggccgtctattttatatcttatagtaaaggatggttgcctcaaaggctgtaaacgtcaatgtttagagatatatatgaaattatttgtaacttccttcaatagtaactttcaaatgccacccttacatggctttatgaaaagtaaacccttctcttaaatgtctgcttttttcttagagtaagtttcttgtgttggctttcttttctctcttctctttatcagtgaattcatttattctaaatttttttctgatgtagtttgggacttcctaacttaacaatggaaattgaaaattggagaagctcattctgtattctttcctttttattccatttttgatactggattatgtctgtataattgctcaaattgtgagtcatgtaggaacatgctctgtgtttctgcacatgatatttaaaacctatttatgctttcttaaccacaaaggggaccataaaagtcctgtcaaatagtcccagactgtaaattccttgaggtcaagagctgtgtcaaatttatttttgtacctctttctgctacagctcccagcccctagcccagtgccaggtagctctggcaaatgagagtgggattgaattggatttctcgttctgaccactctcttggtgcctttatcaacttgtccaccccattgggaggaggggcatggacctgtcaagtgtgatgaattggtagatcatggagttttccatcctccactagaactttagctgtgtttagacttcagaatgctgagtaactaataaaaaacgattccaaagcactctgcagatagaaagtgcttcatgtgtaataaataataatagcctcttaagattaggcacagccacacaaagaagtgccagtcttgcaggccgcaagaattcctgatagaccttatggttagagtggattggttgagactgacccttgtcactgttttgtaataagcagtttcacctccaagttaccacgtattttccattatgggaaaagggtagtttctgaactatctaggaattaatccttccaattatcgttaggagtctgactgaaggaacaccatgaaaattgacagtcaagctttctaggtaagcctaattcagtgcttaaatttagttctaaatcctgtccccttctccaactgttatttctttaaaggaatcagcagtcacctctattttagttctacagcatgtggtggtcttaagaggtggaaactggcaccttttcccaaaggagagactggaatggccagagcccatcctgactttgggtcatcactttcagattaaaacataactgtacagagtacatttcccttgattctctgtttccacagagaggcttttctgctttagggtttcattgatgggatgacttcttttcctttgtcctagagtgcgggtcaatctaattcaagtttggtgaataaatggagccataaactgtgttacccactttatttatttatttatttacaaatgaggtctcccctccctctgttgcccagcctggagtacagtggtgtgatcatagctcatctcagcctggaactcctgggctcaagcaattctgccgtatcagtcccctgagtagctgggacggtgggtgtgcaccactgtgcctggctctccaccttattaaagtgagttaagagaagcataaacagtgttttgctattcttcttggtaactttaaatgatgctttcttctcagcaatgatggtccagtctaactgggcatcattcatttagctattatttattgagcacctgctgtattccaggaactttttttttctttgaaacggagtctctgttgcccagactggagtgcaatggcaccatctcggctcactgcaacctccacttcccaggttcaagcgattctcctgcctcagcctcctgagtagctgggattacaggcacgtgccaccacacctggctaatttttttgtttttagtagacatggggtttcaccatattgtccaggctgatctcgaactcctgaccccgtgatcctcctgcctcagcctcccaaagtgctgggattacaggcatgaggtaccgcgcccagcctccaggaacttttctaggtgctgctggtcagtgaagaaaacaaagcctgctgtagttaccatttgaaagactgaacagaagtgtgactttaaaaaatgatttggcaaaagtatgctttaaataaataaacacagcaaacaaaaaacacaacagctctttcattctgtcctttcctctattctttctcttgtctcccatttttgtcctgtgtgtaacctgactccacaccttttattctctcactctgcttatcaacacagccatacttgcttctcaggctcttctgtgtctctttgttgtgtctgctgtgcttcatcatgtggcgatgaagtagatgaaggttgttggtggccggaccccaacttcgtattccttcttagctagttccttgattgatctccagacatggagtggcaggtaggtgctcttgttgtaagtcacagaacctggaggaaagagtggttcgtggccctggggcctctgggggctgatgcttggatatttgtttagatatttgtttggatatttgtccccgtccaaatctcatgttgaattctaatcctcagtgctggaggtggagtctggtgggaggtgttggggcggatccctcatgacttggtgatgtctttgtgatagtgaattcttgtgaaatcttgtcatttaaaagtgtgtggcaccccccaccctccaactctgtctctctctctctctctctctctctttctctctctctctctctctctctctctctgtctgtcctcctctcctgctgttgccatgtgaagtgcctgctcccttttgacttctgccacgttgggaagcttcctgagcctccacagaaggagatgctgctatgtttcctctatagcctgtagaactgtgagccaataattcaacaactcaaccacttcttttcttttctttttttttttttttttttttttttggagagacaggtcttactctgatgcccaggctggagtatagtggcatgatcttagctgactgcaacctctgcttcctgggttcaagtgattctcctgcctcaggctcctgagtggctggacttataggcacgtaccaccatgctcagctaatttttgcatttttagtagagatggggttttgcccctttggccaggctggtctcgaactcctgacctcaagtgatccacccgcctccacctcacaacgtgctgggattacaggcatgagccacctcacctggccaacctcttttcttttaaattacccaatctcgggtatttctttatagcagggcaagaatggtttaatacaggggcccatccagcagcactgcattaccaggattctgctgaagaaatggacgtggccccaaaagccatagcctggctgccaggtgccccagagtattgtcaactcagaggaacatctctcaggaaatattccttgattctctcttctctattagttttttaaatgcttctatcccagaggaggtgctcagtaaattttagtttctttccttttccggaaagtctcatgactctttatctgagtttgacttaagagaacttacttaataataattaataataaagaataaaacctgctaataataagatttaatagaactttctgtttaattccatggttattatacccatttcttaatctctctaagagacatggactgtgttaaagtgtgtttatgaactggtggtcgagggtgcatttccctcctaagaaaactcattccttgttatgggataaggttcttggagctacatttaacactcagtcctagacttcagtggctcaaatgccgagacatgacctccatattgaccacacggttgatcatgctgaccacagatttctgctaaagcttgaggtgcctgaccatccctggctattgtcattcgccctaaactagctgtttgggaatggggccagtgatgaccctttagtagagataaggcagagcttgtggaggaaaaatcatttattctccattcccatgatttagccctctaacttcatgcatttctttttgccctttttcttgtgctggattttagcccccagcctctctttcgatcatgataatttgcatttattacacacgtactatgttccaggcactgggtaaattgctttctattgttcatttcatttaatcctcaaagccagcctatgcagtagatactagtgatccatattggatggatgaggtatggatggattagaaaggtttatgtagcttacccaatgtggcacaacttgtaatggcagggtcagacttagaaactaaatctctccaatactagcttttgattttatttttaccctactcacccctgatattcgtcccctggccttttctgcttacctggcttggagcaagtcctcatctgccaaagactatgtaggtggttggaaggagtgctctgtcctcacctcttcctcccatggcacctgcagccagagacctgctgtgtgtgctatatactcttctgacctctctgattctgaatcgactctcaaggctgaattggctgacatgcatcttctagtggattcattgtttttcatggtttacttggtttatgacaagctagggacagcttgacatttgctttcccgtcagtggtctggggacgtgcacagagctgcttgtttcagatctcctctcggtgtttctctacacttagtgaagactatataaccatggctctattataatacaatacgttataataagatctaggggcattctcgagaacttgggagcaatctaagaaaggagagtgaggttggagagaggcgtgtcctttgcatcttctggtagatgatggtggaggctgtgtaataacacgccaaagcctagcccacttgaaagcatcacgctctccagggaactgcctcagcctggggcacttatattatccatgcttagcatttttgtattactttacatttgtgaactgctttcccatgatttattagctgttcttgtttttaatagcccctggaggtacattgatattcaggcttctgagaatgtaaatgcacagggaacgttcatctcatcagatatttttggatctgggttcaggactctgacctcctgggatgaggccatttggggtcactgcctcccatggattagtaggagatcaagtggacttaacttcagctcctaaagtctccaaggcacagccatggaatgactgcagctatttaaggaaatggcgtagaagccattatccaaagagctggattccagtcctgactctgctgctgaccagcttcactggccttgagtagttgctttgcctacctatgcctcagactcaccctctataaaacaaaggtaacctctcaagtccctttagaccccccattgtattaaatataattctgtgactttggactccttctctggaaccccttgggtagccaatgaattatatgacagggaacatgggtatagatataacccattaggggacttgaattgagaaggtgctcaccttcctttctctaggattcaaggaccaactgacaatgatatgctttcagattcattttaagaagcacacaatcctcattcactataaaagtaagatagcgagtggagctgttagaggaaagtcagactggagccaagaccatcatttctgtatcttctgggtgttgtagaaagtaattagcaggcttgattatctcactggttcaacacacattttagggatgtgatgtaatgtgaggaaacatttagttgtcagattttagggctgtatcaaatttattcttgcaggaaaagtctagttgtcctggcaacctaaaattgatttctttttgctcttgtcagctgaaactggtcccctttgaatcattcctctaatttaatatagagagctgtgtgtctccacctggtgaccgaatcatttttaatgacaggtaactccagcaaatggctcctctttcctacctgagccagaagctatagtttattactaccttcaccctgtgttgttctctttgtgtttatttatttgtctgtggagtgaggtgtgtaagtaaagtggcattcaattaattaagagtttaatcaggcctgtagagcagtgatgtaattggcagccaatcactgcctttcgttttcagtgacctcctagacatgagtgggattcgaatgggctctggaagagggagtccttttgtgtggatgtctagcatttttgtaacccgaagagggtgatgtaatggcccagatgaaaggagaaagcggagctgcatggctgctttctgcctctgtcagtcatctctatcaagggggtgggtcatctatgaagggtggaatcgacatcattaggaagaaattgatgcctatgacaattgaagaggttgtgagagagcaatttgctttccttaaatggttgcaaatttcatggaccacgaatgccgcatctcaggatacagaagagaacttctgatggggaacggctaccagtaattttgaggaaacccagaaatcagcagaaatgccagaaagtgaggagacgaggaaataggtattatcaaaaaagtccagtgcccatcccccaccccgcccccaaacgaaacaggtatccagagtctagaatctgctgatttcattgtgattccagttgtcgacggtcctatgtagacaggtgatttgtgagtctttgaaaggaagtagtgttcaccaagagccagaacagggtcttaaccagttcccgttttgtctgggttaaccaactggtggattaacacgatgacacagacatagtggggagaatgtgggctttggagttggattgtctggatttaaatccagagtccaggtcattgtatacaaatgaccttaggccagttgtttaatttttgtgactcagcttcttcttcatgtcagttctatcctggggctaatgataggacgacaaaggaatttttttttttttttttttaagagggaatcttgctgtgttgcccaggctggagtgcaatggtgcaatatctgctcactgcaacctctgcctcctgggctcaagcgattctcctgcctcagcctcccaagtagctgagattacaggcgacaaaggaatttttgaagacaaaatgaaataatgcatgtgaagagcttaaaacaatttgcacatatgaattatttaataaatgtggttcttactactgtttgtaggaagacatttgaatttagtaaagcacataaaagccttttacatatgtatggataagtccgtaaacaaatacacacttattagtgatgcgggtttagaaagagtatatttcttggtggcagaagttccaaagtcaggccaggcatagtggctcacacctgtaatcccagcattttgggaggctgaggcagatggatcacttgaggtcaggagtttgagaacagcctggccaacatagcgaaaccccgtctctactaaaaatacagaaatattagccaagcatgatggttcgtgcctgtaatcccagctacttgggaggctgaggcaggagaatcgcttgaacccaggaggcggaggtttcagtgaactgagatcaccccactgcactccagtctgggcaacagaggaagactctaccaaaaaaaaaaaaaaaaaaaaagctccaaagtcatattgcaaggatgaggacataggtagggaaggggaaaatttgtgaccatttttgcaactttccaaactcctttctcctcccccatctttctttcttccaagaagttaccgtcattagcaatttgccatgtgtctagtttttgtctcacatttatatacctgtaaatatatgtttattttttgctttaaaaacctcaacagttatttgtataaaatttaaattctttgttctttcatgaaatatcatgactacaaacattgaaatagttactccgaattgcagtcacatgttttacttgtatataatcattcttataggcagagggataactgtaaccttttcccttctccttctcaccttgccctttgggagacgtttcttccctttttttgtgtctttctaccttgtccttctcctcccctcctctcttttcccttcccttatattctgttttcttaccgttcgtctccttttctctctccttccctccctccctcccttgcaatactttcctacctttcatactttctttattatatttttagtctcttgtctttagcttaatatggggctcagtggccaggcgtttacataatattgtgggtccttgaaacatcaggtcttggacacctagtctcagctctgaattgtcaggttcctgctgatatactttctgggtccactgttgctttgtatttaatactggaggttgtgataacattgtccagcttcaggaggccatggtagcgcaggagggatgcatgtgttgtgtagttccttgtctggaatgcagggtgacaggaggttggcttgtgtacacatgttcatctccttgggctactggagagggagtctttattttggtggggtgctcctaagagcagtgagctcagagcctctgtcttgagacttgctgtgtgttttcttggcctcccaatgctcctggcataagtgacatccctgcttaggaccctacactcatgatttcaggcaacctttctgccttccttttggcccctgcctctccaccccatgttcatattcttcatcccaggtgcagtgccaccctgctggctacctctgccaggcagcatccttcatgcttagctcaaattccaccttctcagaaacatctgacttcacatttggtgtcagtctctctcctcctccatttcccatcacacagtttgtactttcagagatactttcatacaccaccttgtattcaatgggtggtatctgtttctgagttctgatcagagggcagacatctctgatcctttggaggctagctcagtagctggcatttataggcactctgtaactgttaaattgaattactgaggaggcctgaggggttggaaggtcaaatgcagttaacccagggaactagaagggcccctgggaacttggttttggagcatggcttttatgagcagctatcagcttttccccaggctccttcttaatcctgtctctctagaggcacaaggagaggtggtgtttgcttaagatgctggtggcattcctagtgaagttaggtcagaatgtgccatctcttctttagctctcaacttcttagagtgtcaaccctcctcatattggaaaagcttagcttttaaaaaggagaaagtggtttacatgatgacctctgaatttttgactttgattattaatcttcttgaagaagactttgcagttgcccctgttacaaggaaagcagacatgccaagttgctgcatttgtgaaattgaatgaaattctggctgcgttttatggctctgacctttgggaacagtccagggtcagactgctcacatgatgtgcttgataaatccgcctcccaacagcactgttgagatcttaactagaattgctacttgcgaaacacctttttctgacttgcagttcagattctgcatgtactgctgactactgcttctagtggctcattcagataagtatgctatatattaggtagaaagaggatgcgtgatactaaggaaagagaaaaagagccagcccaggacacttgggttccagtgctaagtctgcaagagacatgtttgacatggggccttagttttcagatctataaaatggagacactaatcattattaggaagggttgtcaggagttcgagactagcctgaccaacacggtgaaagcccatctctactaaaatacaaaaattagccaggcgtggtggtacatgcctgtaatcccagctactcaggaggctgaggcaggagaatcgcttgaacccaggaggtggaggttgcagtgagccgagattgcgccacggcactccagcctgggtgacagagcgagactccatctcaaaaaaaataataaaaataaattaataaaacaaaaagagctcctcctatgaaagctctggaaacatcctccaccaaactggttgcacttctctaggcacaatatggtttatatccttctaaaatcagcatctcggccggacgcagtggctcacgcctgtaatcccagcactttgagaggccaaggtgggcaaatcacctgacctcaggtgatccgcctgcctcggcctcccaaagttgttgagattataggtgtgagccactgtgtctggccaggaggagctcttacagagctggaagtatttactcagagaaagatggagttagaagggaaggttgagaatgagagacaagttagtgtttattcaaggtggaggtgcacaggcctaatgtaggacaacggcaagtgggttggagaagaggggcttacgggaaggatgggcaggagaaatgggatgggacccaggaggcccaagggggaggtggaggattcaagtcagagcttcagatgctgggtctggagacactttctgaatgcctaggaggtagctgtggtgttttgcaggataagaaagacagaggctttctgtagctaccatcctgctaggtgaaatgaagggatggtctgggatgtgtgtgtatgtgtgtatgtgtacccacatacgtgcatgtgtgcatgagtgtgtattggtaacagaaccaaggagatcagggacttacccaaggccatacagctgggaaacagctttcatttgattacggtgctaagtttagtaatgactgcgagagacaaaaacgggcagggggagcatgtagggaaagggcctcggccccatttcctgccctctcaggcaggtagtgagtaggagttttaggtttcactgtttgatagcatcacctcctctgctttcccagaaattattcctcgaagtatgactcgaatcattcctctgttgggagatgtatcggttcagagctgactttctgctctggttgtttactgaaaaatggtagcactggcaattcagagggggcataagcaagtgaagaaaaaaaaaatgaacaaacagggcatgtgaggtcaggggccctggttgtgagtcccggccctgcttttagagacccatgtgaattgggcagatcaatcaacttcttagtgcctcagctttttcctctgtaaattagaagatagtgatttctgcttgataaatttattgtgatagtgctttgcaagttgtattgttggtcgtaggataataaagataaaggggtatacagacttggattctgtttctatatatgtgaagcgttagagagaggtggtaaattgtttctctcccgtgggttgtgcacatctctgatattatggtaatccccatatcttctccttttgcagggtggggtgtcttggatagtatggttactgaatgtagaatctactaactcctcttttttatttcctgagactgggtctcactgtgctgtccagggtggagtgcagtggtgtgatcatggctcactgcagtcttgaactcctgggctcaatcctgagtagctgggattacaggtatgtgccatcatgccagctaattagaaaagtttttctttgttgagatggggtctcactatgttgcctaggctggctttgaattcctaagctcaagtggtcagcctgactcgacctcccaaagtgctgggattacaggcatgagccactgtttctggcctcctttttaatattctgccctgtgcaaagcaccagcaccaacagcctccctcccacaacccccaacagctgtgcattaagtatcactttggtttgaggatttcctagcttgctgtttatcctgggagaatttctgagtttcttggtctttgtttctttacccaaaagttggggatagttcagctttgtctgcattgtggacactacctccagaaagcaatgggaagaccctttgtaagctgtaccgaactctttgtatttttggagcacattttgtcttttttctcccttcttctggtggctgaggtacctctttggtcttgaaaagacccacttatatggaggcggaaatgggcttatagagggaagtgactttccaagggccctggaatgaattggattctgagatctgtgcccgtccttgtcacaacgtgtcagattccattatttagtgtgggcctgatttgtccatgcctgggactttcccagaggaagtcatactttctggaaactctctgaggtcttgaaggggtgggagaagtctctgacacaagtgctgctgtggtcatggaggcttccattcctctctccttgtgttgagcagggaattgctccttggatattttaggtttgagtgactcaacatgcttatgacccagaggatgctgtggtgtgtttggcagcatgctggaattagtcagaaggcaaaactgcttgtcctgaccccagaacccacttactctaggtggatgagaaagtcctctcggatcctctatttcctaattcatggcaacttctggagaacagtattttctctgttactgctttatggggtttagtgtggaaattaaagaagagaacttcttattttttgtaaataataatacaatattcagatactgttagtttctgaaatttaaaatgggcatctcacttctgtgttccctccccaaataaatgtattgatactaaaaaggaaagccagctaactttatgaggatggctggtaaatgagccattctgtttttgcttgctgtccaaggcctctaatattaagcctggaccatttcaagcatatatggaggatatatatttcaaatatacattaggggtatatatttcaaaatcgaggacacattaatagtaagaggagaccatgtaagacaaagcacaggtttatttttatttttatttacctgtttattttttatatttttgagatgggatttctctcttgttgcccaggctggagtgcgatggtgctgtcttggctcactgcaacctcctcctcccagcttcaagcaattctcctgtctcagcctcccaagtagctgggattacaggcacccatcaccacacctggctaatttttgtatttttcttagagatggggtttcaccatgttggccagcctggtctcaaactcctgacctcaagtgatccccccacctcggcttcccgaagtgctgggattacaggcgtgagccactgcgcctggccaaagcacaagtttaaaaattacaagtttccaccagcctcatatctcccttggcttataatattcaagtgttcatggatactggggcttgccatcccccgccccgtgtgttaatgcagcccatggaggcttctcatagagacataaacagtgggctccagaaggtctctatttaagaaactgaggtctggcaaggtcacacatcgaggaaatggcaaaatcaagactaaaagccagctctttggattctcaattccctgctctttctgacacttcactcttccctcctgtcaggtgaagagagaagccagatggtttgacaaatggttctcgttgctgtcaaatctgccttctttctttgctcagacagacagttcttaccttccctttttcgggggactggcggaggtggggtgaggagagaggtaggaaggtggatgaaggaaaaaaagaagcattttattgcttcattctttatgtagtagtgatggccaataagttctttttttctctggcaagaagctaagtaaaggcaaggagtaatcgtcaccttgaatttagagcacatagaggcctagaaatggcaggctgtattaggagacaacattgatttcatatatattcatctctgaaaaaacatgtttaagatgccatattcataaatactaataaggctgtctgattccaattttcaggtgagattagcattttattgagtattttatctgtcagattcaatgctggatgtaccatcctcccaggcttattagcataattgctgtgcttaagcaacaataaaaaaatcagcagtaaaatagcatttagtgcaggcaatttgttatcaaaagcttttacttaaggacagctccagcctgcatttattagcaagttagggttataatttatttttattttgaaaaacaaaagtgggagaaagatttggcttttttgttttggaaataatagagaaattagaaagcattgcctctttggaaaattgtccacatcccttcttcctttgccgaaagcaggctgtgatgggaatagattccacttgtgagcgacattggctcagacaaaaagttgctctccttggcattggaacaaacgggtagtaacgtccctttatgcttgtacacacatttccaaaacactttcagatctcgtttgttgctcaaacctcacaccagtcccgtgaggtctccattcttagaaatagaaaaccaagttgaaatgacttgttccagatgaggcagttgagtggcaaagtggaggtgtaaaaactagtcttccagcctccagtcctgtctcagcattgctccccttcacgtcgttgtccagagctcctggtggagccttggccttttccatatgtacacgtgcacacacacacacatacacacagatctgtgtatctacacctgtctatacacatacgtgcacacctatgcacacacatctatgcatacatacatactttttcttttcctaaaagttaattatgtactcttgcatttgtttttcatttgatgtccgggttgaaatacttctgccacatgaacttctcttgatgccaaatagcctcttaaaatcaatctctctctctctctccaccccccaccccccacccccacccccccgcccctctagctagcaactgtatcaggaaagcacttgtgattaccatctgttaaggacctggaacaaaataaatgatgttataagtttttgtagggaagatagagataagattttaaaatatggagattgggaaatcatttttcttccttatttcttaggaaatgtatcagaaataaataacattaaattgatgccttttagtgggttttaggcttcaattatgggtaataattttcaaattgagaataaagttttgagtgaaaatggacaactgaagcttctaagctttgagaggagttattttagcattttagattttcttttctcagtaaattcaaacaaagatcatacaatcattgaatcatagcacgtctaaaatccaaggctctgtgctggccactgtgtgttttacagactagctcagacgtggctatgagccccaagacatgtttaaactattagagaggatactaacgatacattaataatgttcttggttttgacagaatattctagaacaggaactctagtaggatttttgcttatgttacatcattgaaatttaaattcactcaattatttattgactaaatattgagcacttatgtgatgttcactcttgtattttacatacatcatctcatgtaattttttaacaatcatatgaaatatgatctgagataatagtcagtactgttattattgttctcatcattagatgaggaaattgagactaagtaacttgtccaagtcattcagctggtaagtggtagaactgctgtggtctccctgtaaacacatgtttttttcatggtaccacttggcaaaaaacgaataagcaggtacatacgtagacagatagtgctaatgatgattagagaacctcagaactcatgcagaacctggatgtttagagagaaaatggaacttgaaatcagacaggtgttcaaaccctactatgcttcttagtgtttgtaaaatcctcaatttaaggacctcttaggatttcggtgtcttcctgtgaataaaggattataaaatctttctctcaatatcataatgagaataaattacaaaatgtatgtgagtgtctgcaaaggtacctagttcatggtgggagttcaccctatcttggaagtgctcataaacatgcagggttttttttttgagacggagtcttaccctatcgcccaggatggagtgcagtggcgcaaccttggcctcccgggttcaagtgattctccttcctcagcctcccgagtagctgggactataggcgcatgccaccatgcccgactaatttattttgtatttttaatagagacgaggtttcaccatgttggccaagctggtctcgatctcctgacttcaagtggtctgactgccttagcctcccaaagtgctgggattacagacgtgagccaccatgcccggttcaacatgcagttttgtgtactgtttagggacagatgccgaagccacattgcttgggtttggatccatcctaccacataatatcatgtgaccttggacaaacaacttcacttctagtgctgtactttcttcatctataaaatgggcttacatcatagggtccttgtgaggattaacaaagttagaatgcgtagagcatgtagaacaatgcttggcacacagcatgccgtgcttcagtggtagcacttactattccattatactacagccaccgagaaggacaggtacacagtgaatagtttaggactgttcatgttcccggcctcttcactccaagagcatcagcaagtttagtttagaacataggagttgtatttacacagctactaatgaccttggaaaagttcttggcttctctgtccttgacctttgtttatctgaacgagtaaacttcagatgacagagtgtgtggggaatggaatgcatccgcatccttgataagctgccctagtggaatgttgccatgtggctactgagggtcaattcactggtcaaaggtggcctgctggttggtattttttctgtgtcttccgggcaagttctgtctttcctcagtctgcacatgcctgggtctgtcctcagagctctctcccatttccctcttctctagaaagcattgatataatggggccacctcttccttggactgtttctgtagcatcagaaggaggtgggtgggaatttggcataccactttttgaaaggtaatacattctaacatatgtatttcacccaccttcaaagagtaagaatacactgaatgatacttaattttaaagatgtgttgctgaggtgaactctaagacgaacaattcttcagaatcttttactttcttgggcttcttgtcccaaacaacaattatctttataaagcctgtgtgtgtatgtgtgcgtgtgtgtttgtgaaacttcctggaattggtagtgttgattttgagatgtttctttggcttattcaaaatataaacagaaaggctaaagtgtttttcatgtcattaagaatgtctttataagaaaggacattggccgggcgtggtggctctcgcctgtaatcccagcactttggcaggcccaggcgggtggatcacgaggtcaggagatcgagaccatcctggctaacacggtgaaaccccatctctactaaaaatagaaagaaaaaaaaattagccgggcatggtggtgggcgcctgtagtcccagctactcgggaggctgaggcaggataatggtgtgaacccaggaggcggagcttgcagtgagctgagatcatgccactgcactccagcctgggcgacagagcgagactctgtctcaaaaaaaaaaaaaaaaaaagagaaaggacattaagatgataccttaccttgtgtggggggcttgtagctttcaaaacacttaagtacccattttcttatgtgtgctttatgacatctctatgatgtaggcaaggcagggtttatcattatttcccttttagaaatggtggatctgtggttcagagaagtgaaataagttttcttaaagcagttctggatgcaaacccagaacatttgactctagggtgctttctgctccaccaccctgatttgattgtaaggaggtaattcttaccaagtactgtcagattatatagagttgtaatatatcttaaaaatgcccattttaattttctttaaacagatcagttaaaaagttaactgtgatttgataccatcttgtttctccccaagtttaaacagcaatgagtctctaggaccttcggttaaaccagcatgtgtttttcaaaaatcaaatgtcaaagcatttcgtgaaccttgctttaatgaacaagagaagtgaaggtacaattccttttttgcatgaggtaattaggaaacaggatgtgcaaacttgctatatgaatttaaagaggagcacttctactgatgtacaaactggatgggcatattacagagggtttcatgctggtagaaattttaagtgaaataagttctcattaagcatatcaattatttttggactgtgtgaaaacttaatctgtttcatgagttggatctaaggtggtcaatacctctacactccaaaaaacagaagcatgactcaaacatctagttctgattgcagagtgcctttatctggaagactggacatgtcgtcagaatatagagcaagagggatggaatatgctcttaagtttcctgatgacttaagggtctgcactatacttgcttgggaggtgggaaggattgaattctctttggaaaatgcctttgaatctcttacacacatggtacccaataagcctagtgctgtattattagcatcatgtactagagtatggtttacctgacataggttttggaaatctatttcttttatttacactacatggtttcttaggtggcaattctcagtgaattaccagcttcctgatagtgtcttgaaaagcatgctttataaggaggcagaaagtgtttctcttttgacagatgacctccttgaccccttgactttccatttttgatggtttcttttgaggtctacgtcatctggtaattttattggtgtgatttatgcccccagtaaggatcaacttgtatagattctacattctcatggaagtctatgtactgtctctactgtgtaataattagctccaactctacaaacaaggttagaaatgaaatcaccagcattacaagtgagacataacaaatggaagattcccttctctgagtttctctcataccgttaattttatttgagctggcattgactcattctatatgtctcttctgctagattttgaactctggaggactggtctcatatcttattaattataatggtggcgcacagcacattataggtatttattactaagtggttgggtttaatatcttaagaagcagaaaatgtggtttttcttgagagagagatggttttggatgttgttcctctagtatattctaagcctgcccgcctggggctctgtaactatggctcctaacgtggggagcccacaatctagctatatcatgttagcgagagctctttgtatactgaaacaataaacttaccatcttgatgagttttacatgtagaatggcttaggttataaggtactgccacctcattccactgttgagaattgtctaatgcaaagctcactttttaaacatggataattggacagtcatgagtggatcatcgaagggataagcaaaatatatgtcaaactgagaattaatatctatcaaaacacttgctattatttggtagatgggaggttattttatttttaagaagtagattggctgaatggaaaagcaaaatgtggcataaaataaaatgggatattgttcagcagtgaaaggaataaagtactgatatggactacaacatggatgaaccttgaaaacattatggcaaagtgaaagaagccagttacaaggccgggcaccatggctcatgcttgtaatctcagcactttgggagaccgaggtgggtgaatcacttgaggtcaggagttcgagaccagtctggacaacatggtgaaacccccgtctctactaaaaatacaaaaatcagttgggcgtagtagtgtgtgcctgtaatcccagctactcaggatggtgaggcaggagaatggcttgaacccgggaggtggaggttgcagtgagccgagatctgccctccagcctgggtgacagagccaaactctgtcaaaaaaaaaaaaaaaaaaaaaaaaaaagccagttatgaaagaccacatattatatgattccatttatgtgaaaagcccacaataggcaaatctatagagtctgtagcgatagaaagtagtggttgccggcagggttggggtagaggataggtagtgattgctaataactgtgagtttctttttgggatgctgaaaatgctctttatatggtggtgatgattgcacaacactgtgaaatactaaaaacagaaccgtaaactttaaatgggtgaattgtatgtaaattatatctcaataaacctgttttaaaaagtggatttccctttaatctattctctgaggattgcttcagggattcaaaatagtgcatagtgccaagttttaaactcatattgatttgtttttggtaaataagtcatgcatgcttaacaatggtgaacacacttaaggaaaaagtggtaacacaactagagccaccaaaccgaagcaagtatatttccacctaacttcatgcacgtttttttctcagaagctttaaaaatttatactttctcaaatgttgattaatgagatatctgataagaaataacagggtactgacagtcctgattgtataaataggcattagggattgtgttcatggtttgcttgtcagcacaagagaaatgtgtgattatgttgaatgatagttaattttcttatccacccattttaaaaataaagatgtacagctagaaaacaggtgcccagggaatagaggagacctgcagctttgataatgagccccagaaagaaactagaaggaacaagctcccgcttaggaggtgccgttcgagtcctggccagtgtctgactgtagctgatgggtttagagaactgtggctggcttctcacaaaggattttttcatttactcttgttttgtgtttgagtatagacagcttttcccatcctccatcagggtcattgtcccaccttctctgactcacttattgtgtcaacagaattaaaagagcagccggtggacgtgtgtagaggctgaaggagagctgtgttgctagctttgtatttgaacggttcgtacacaaacagttctctttgattaagtatccggtgaaaccaattcacatgaactccaattaaactttaatgaacaagtgggtgtattaatatcagctgagtaatgcaggcagcacagattccagtaagtgactcacttctctgagcagctcattccccatgcacggttagagttactagaaagcttccagctatatttgagtggatctggtctgggccttgtaattctaacaatcctcagggctcgctattcatctagtgacaaaaccacagtcatccagacctctgttttcagagcaaagattggggatgaagagttttgttcacattgagcaattaggcccttcgttgagcagtgaccatttggacttttattttcctcatcttcccatttttgtttttttgttattttattttttagagacagggtctcactctgtagcccaggctggagtgcagtggtgtgatcacagctcactgcagcctcagcctcttgggctcaagcaatcctcccgcctcagcctcccgagtaacctggaacaacaggcatgcaccactgtgcccacctacaaaatttctgtagagatggggtcttgctatgtcgcccagcttggtgttgaactcctgagctgaagtgagcctcagcctcccaaagcgcttggattatagatatgagccccgtgcccagcctttattttgtttttaagtgagaattatttttttcttaaacccaggggcagtgtaggtgaaggttaaggcagtgaagatagaacagtcagttttgaaatgcacatagccttcctgagcctcactttcaccacatctgccagtctgcctcaagtctttaagtttccctacaccagaggcagcaaggtgtgcctggaatgatgaattcctttgagcacagaccctgttccatctagagactgatgactgtacctatttcctaggaaaggttaagcaagatcgtgaatataatgctcttcgtttcatgccggcacataataagttcccactaaatgtttaacttggtccactgggggaaggatgagaaggaggatttggagataaatgagacttggcccttgacaattcaggagcttggagtcttatagagatttgacttaaaaatgtctgtgtaactccagagtgataaagacaaaaatgcttgaaaaagataagtgaggattcgggggatggaggaatcccagaggttggccccgtctgagaaggctggaggttagggtaggaagaggtaagggtttgggaaggtagttctaggctgactgaagagtgtgagcaaaagcagaggcagggatgtatccaggtatcagatagtgcacatttagtgtggttacagtaggtgataatttaggaggctgattgaaactgaatttagcctctgccttagtcaccaagtcctttcccagctccacttgctgttctctctctcattctctcctacctatattgaaaccagttgaaaataatggagtcacacagaggcagatggcaataatgtccaggttgtggaacattagctcattgggcttgctaatgcagcacccatgaatgaaatttaccctcttcctctcagatagctcctgcactcaataactcccatttagggcacactgtgcataaagctcccaaccatgaagagcagggaggatctgcctctaacagtcaggtaactcacaaagactggaaggaagtgactgggttacacatggccagtttcttctccaaactcaataattgggtaactctctgcctcctcatctgagaacaagggagtgggagggaggcaaacaagaaaagagaagaagcagtggagaaaggagacgttctgcagtgccaggcttcttgccccacactcttcccaaatgtcaacatagttcctttaggggaaaaaagtgggaggctagaatggtaggacagggccacaatatggaagtgaaaaaccaggggcagtttcctgagcagggaatgatgtcattcgatctataattcagtctggttaatctacttatgcaacaccaattgaaggacacacttagataactcagccttgagtcaacaaatcttgtgtaacactgccaaggtccatagtgcaagaatcagcccccacttcggaaataacaaccacccctcagtgccaaattttggacattgcttgtaaatttcagactccttccctccaagatactgttttagagaatgtcgtagggtaaaaaattccaaggggtaaagacataaattccgtaatactacaatagatgggaggctctaatcaagtagataaattctatttttggaattgtgaataaagcagaaaagattcttggaaatcaggaattgaatagattgatggtacaaatgagagactatatgttgcttaaagaaaacaaaagattgcctatcaggttttaaaatgtgagtcagtagtttatatagtgattcaagctgaacagctatcttggttattaactaaaatcttttctttccccttccattttatatatgaagaaactattaatacaaaagtcattatcaaaggacactggggctaggtttcattacccagcttaatccttaatttcatattgagcatttcatattgaagtgaaacaataaggatatgtttctagagactgatgagacaactgaattggacttggttttgacattcaaagggatcaggtagaggtacttagttgagctcactacttcattttggcaaaagacatatgtcatagaaatgtagtagccatgatggattatgtatctttgaattgggagcctatgacaaattttctccaatgggaagtttcttcagagcctatcattgtttcaacaataattaaagtaatttacagagaatgtgctcatctacttttacctactgttatcttttttccaagttaataaactgaatatattgtatagattggttgatagccttcctgaaatgaacatcctttgcaaacctatctctccaaacccaaatcctgcccaaatttcccaattgtggtagcaagcccaatgagctcctgatacgatcctaataggatcctcttctctggaaatcctcgacagatcacacttctcttttcttgggaacagctttctgtttccttgtccagaatggatgccgttctgttatcctggtcactctctgggccccctccctttgtccaccatgagcacaggctactggccactgatcctcctgggggcactagcctggctaccccattgcttattttacctttgcttctcttaaataccattgttggtgattgctccacacagcaattgttctcacctaagtctgtggataagactcacttagggaggttttaccagaattcagctcatctccctaaatgtttgggtctggactagggcacacacttctcgtgaggcgcttctcatgagtaccccttctcaaactttacgggtatcaatttacttatggcctgcagtgcataaagtgaaagctttctgaaaagacatttaatccatcggtatgaggatgaaaaagacacactcagggcatgaaaagagtgagaaggtcacaaaaagggtgtggtctcagctggagaggaagctgaacaatcctataaaggaacaaaagctcagcgtcctgaccatctgtttctttctaccccaggcccattcccatcatgagtatttattctgcccagtgtgggatgggttctgttctagaagtttgcatgagcagagggaagcttagccccatgaggccagtcatgaggctccatcttattctataggcttcagcctttttatgaagacctagcttctactcttgccccaggccctaagcaggcccagacttttcccatatacacacactctctctctaacttatgtgtcttacatcttaataaggcagcagattgtatcagaatcagttaactctttatcaaaaaacccagagcagacagacgggtgaacttgctcatgggctgagctagaagggaggccacttttccttcacacagcctcggactctccctgggcttttttgtgtgtgctgcgtggagactgtgttctaacatttcagtcatatcttccttattttaaaactacagaattgatcttaccaacttactggggagcacgtcgtcagtaaattctaatggaaaaacctgtctgatcaatgggacaggaaagcgtcacagcaataccggtgagtcattccaagaccaggcacatttgagctgtgttgcttcttcgatgctgactataattctccctcagcattacgtcgtcttaagcagcttttgaatcttcgtctctgattccctttctaggtcagactgtgtctttttttaaaattgtgcctggatatccccttaataggttggacaagtcccgttaggataattggctgtatgaatatgcgaaaatagcaacagtgaattttaaagttcttgaatagtctccccgtcccactgtgaggtgaggcatctggggtgggctatctgttttttgattcttggttcttgtttttaaaaaaataggatgttggaccttgggatgagagggaagtaaaacagttttggaacccttttagaaagcaaactaagacaaaactcctttcttgagaaaaatggatggacattgtaaagaagacagtagggcaccaggaagccttgagccaggtctgcctgtgtcacatttcgagttatgagcttcaccgctctgctgtctgtctctggagatcatcatcaaacccctttctctgagttgttgaatggctcagatgagttaatgcctatgaaagtactctgtaaacagaaaaataccttcctatttgtaatctcaacaaagggacttttatcatccctaaaacagaacagacatttctttttcaattatgaaagttacatagactctttttaaaaagttaaatgcacaaaagtatgatgaaaattaaaataaccctaatgagtccatcatccagggacatcattgttctaatttaaacatttgggtaatctgttctctttttttaagaagggttgtgtgtgtttattttttttctttttttgtgtgtgtttgtgtatatctatgtgtatttttattctgttttctttacataacactgtattgtaaacattcccaaaatgtaaattttaatcattgcataatattgcattatctgatatatgcacatgcattttgagattttgtgacgaacgattgtgactattgtttccataattaagggttagctgcttaccaagaaaggaacttactttaaaacatggcaggcacacttggccatttttttttttttttttttttggcagtaaaggaatttgaagtatccagttttttaaataaattaatatgtattgaattggagtttagcagtacttttagttaagatctcagttaaggtaaaaaggtcagacctgtagagttattaatttgtagaaaattctgactacagcaaaacatattagcccaagttctctttattaataaaacattagttacagaaatactaaaaaatagattggttggtctcctgaatgtcctgcgttaggtaagttgccttatgccatctggaagactttttattttctcttcatagaaggatacaatagatttgttttgctcaaagagttcattttctgttgctgggcacatatataatactgtaaacacatttctggatatgacgacataatgatgaagagagacctttgaatattttcttaaatgaagattgaaggagtagtaagctgtgagaggagatttttctactatttcagtcctaagattgatcttttttgtcatggatttatccctttgtctctatgcatttctatgtgtctgctcagcatcttatcttctacatttgccctagttccatccttccttttttccatgcttgtttttccatacacctgcccatccaccctcctgcctctctatccagtcgtccgtctaaccatttctggcaattcttacctccctgtttcatgtatatctctccatttttacctgtcatttatatttatctatttgcctatccatatctacacctgcttgtctgctcactgtctatctataaagttaatggagatgattttgatgaaaacttatgaatttctttattgcattttacactgtgggttacaggggccaaaggccatggggaccagaaagtggaaataaccagagctcggccatttttgtttcatttcaaaatcaggagggaaggtcagaactaacctgattatcctttctgtgatgctaatcaggatgttcttagtataatgccttttggagactgttattttaaggaatgttttgctaagaatcagttgccaggacatagaatgaagagctattgtatagcttcagagtagttctcttttaagaaggatataataaattaaaaataattttcttgaggtcagactaaggaaaagtcaaagatatacaattgccatctctccaaatttattgattttatttatttattatttattattattattatttgagacagagtctcactttgttacccaggctggagtgcagtggcacgatcataattcactgcaacctcaatgtcctggagtcactgaagcctctcaagtaccttggactacagttgtgtgccacaatgcccagctaattttttttgtactttttttaaagacagtattttgccatgttgcccaggctggtgttgaactcccgggctcaaactatctgcttgccttggcctcccaaagtgctgggattataagtgttagccactgtacccagcccaatttactgacttaaaaaaaaagaaaaaaaaaacaacaacccagaacatattgtaacattctcagggagtttagagacaacataatgaaggtattttcaaggtttggggagctgcttggaacttgattttggacaaaatggaaggaaaacaaccatcctttactgaaaaccatttttcttctgattctgagaaagctgctttgcatttactctctcgtttaattctcccatccttccttcaatgtaatttctattatcccaatttataactaagaaacagagactcaaagaggctaaatgatttgcctaagtttacatgattaatgagtgccacagtttttgtggaacagagacttgtttgaatctaaaactgttactctttgcagtaaaccacaatgaaaccttagctatatatcagttctccactttaaattttatggtaactcaacctctgaaaaggatcctgcaaatagcacagttttcagttcttttcttgagagaaggcagggctttcatatggacatgataaagaagacagctcttaggatgtggatataagattgcatttatgaactttactttagtatttgacagaatggggttttcctcacatgctgctgtgtgtttttgtttaacctaatctgagtctcattaggcagcttgatccagaagacagaaaggtctcctccacaagatgcaccttatgaagcaaacaaaccaatgaaatgcagtaactcccttcaaacttttgtaagctctggaaagccagaaaagacagctattgtaatatattttgccaggccagctgttatcatcacaaacaagcctgaaatagcaatgacttttgaaatcacagcacatttatttacttcttaacttttccataggtttgaaagcttgctccctccctttttatcatgctaaactgtagttgctaacaacattctattctgggtgggaattagctttggcataattaagaatggagatgggggtggataaaagaggttctgccaaaggacttgtcttatatgattttattcttacttttaatctgttttattctttaagcatgtattaactgcctactacgtactcaacactgtgctatgtgggaaaaatatactagaacaagggatggtcaactttttctgtaaagggacagatggtacacagcttagatttgtggtccataaggtgtctgttgtagctactcactctgctcttagataatacacgaaacactcaagactccaccataaacaatacataaataattgcgtgtgaatatgttccaataaacttttattcacaaaaacatgcagtaggctggatttggtctgcgtgccacaggttgccagcacctgtactaaaatgtccctgaaaatagagaactttgttttgttcattggctgtgtcaccagtgcctagagtagtacctggcatgggataggtgaccagtaaatatttgttgaatgaatgaacttataaatgaatgaatgactcagactccttctctgatctcttctatacttaaagagagtacaaagaactgtgggaggtaaaaggtactttcctggaagagagagtgtggagggtcatggaatcagttggtatttgagctggaccctgaagaataggtaagtatatgtcaccagcggtggtaggagaagcacactgcaggtaggagaaacatgcaaataggataagaagcagggcacttgtggtgaataatgaggagatcagatgttttataacaggagtttcctgacttgcttgatcttcaaaatcacctgttattaaaaataggttcccagtaccctccctggagattctgattttgtaagacagggttggccaatgataatttacaaaataaatatttgaaaaggtgtatggctttggaaagttatactggaaccatttctaatgggaaataaagttctcacttttcttagtaaaaggactagtatcaactagtaattgctggacctataattaccctataccttctgtgccatagaatggaggaagtgccctggcggaaatctaccctacttaactgcctgtcttcatacgtcccctgttgatgttgtaggagtaccccagcctttatgatggaacagtgtgtaatttagtcagtaaattgtagtcatataaattataataaatgtatcaaatttgtagctactagctttgttgcttttgaatttctgggttggcaaacctctcagagggcaaatagatttaaatggcgtaatagaaaatttgcattctcttgctgtacctccaattcagagtgtagtgtaatgcccagatttgtttgtagactaagatcactggaagggctgtatagtttaagcctcttttttaataatggggggaaatctgaagcctaaaaggtgggcagggacttgctcaagttctgtcaccaaattattttggcagaaccaggagtataatgcgaatgttaagttactaaatttagttttcttttcatggtgccatgccacatgtatcaataaagttcctaatttacatactttctctcccctttaaatctcacagctttttgctcatatacctcttgtgtactgcttaccataaagttatatcttaatatcttatcctgaacgagtagcccactgttatcccaaataaaggctgagctctgtttccctggagagcttaacatatttcctggcacttagcatgtgttcagcaaataattgtagacttgaaatatcttgagcatcttttcttttcccatgtgttttgactcaagttcctttgcagttatattgtcagaaaagtcaagctcttccagaattgctgaaatacaaagataatttctcttaagcttccttaaaaaagttgaattccctattatggctgagacctttcttaacagctcttctgatagttaaatgtcagttgcttcaaaaaagaaatgtcattaaattatcagggaaataaattacatatttatttgggctgaaatattttaattgaccacttaaaataaagataatagcaaaagactgatacatttcctagcttgcacatttctctcaattgccaggacttttttgtttatatctcttaggagatttcatttttatttcttctgcattatggttatatatgtgcttttgactctcccagtgggtgataagttctttgaagtcaatgtacttaaaaaaattaatctctatatacccacaaagcctagctctgtaggagctaaatactaaatatatttactttaaaaaaattgttaggaaaaggtcagtgttaccttgatttcagtgttattttgcagccctcaagtcaacaaccattttactgaacatccagctttgtgcctttctgtgagcttaacattggtagcaggtgtggattgggacataaaaaagtaaataaaacatagttaagttgacataacccataagtataatgtgatgtggaaatctgagataggtacaaataacctgtactagaatctggaggcaggttaattctgacaaggtgagtccagagaggctcacaaagtgtcaatatttgagatgagttttactgggtcttggtcttctatttcagttgctggttttgatttttctcaacgcaacacacacacaaacacacagatacacacacacacgcaaagtgatttgttttctttttataatctctttgactatagacttaagagaactgcctttatgtaagattaaaggaaaagaggagcaggttttattgtgttatttgaaggtttttcagagtctgaaacacacagcgaccgaaagtatttgggatggatgatgccagtagtgtcatgaaacaaagtacgttggccagagagagacatatactattgtaaattaacggtgttcttttccaaggattttctcgtttacctgttgttgtcttcaatagtttaattacactaaatattctcgttggtgcggggagcatagtatggtggaggaagtttcaactttgaagtcagacagttctgtttctgtacctaacttttcacttattgtatatgtgactgaaggctgttgcttatcctctctagggttgtttcttcatccttgaaaaatgttgtgttttctttttcttttcttttattttttttgagacgtagtctcactctttcacctaggttggagtgcagtggcgtgatctcggtttactgcaacctgtgcctcctgagttcaagcgattctcctgcctcagcctcccaagtagctgggattgcaggtgtgcaccaccatgtccagctaatttttttttttttgtatttttagtagagacggggtttcaccatgttggtcaggctgggcttgaactcctgacctcaaatgatccacccaccatgccctcccaaagtgttgggattacaggtgtgagccaccgtgcctggcctgaaaattgtgatcatggaaagtacctcacagaattgtgggatgaatggagctaatgtttgcaaagctcctatttcagtgtccaggatatgttaggccatatgcctacagagtcaggcacattttcttgaaacacaaagccctttatctagcttaacctcttcccactttagagtcgtgggtgcaggaaatattttgttttcctctttaccgtaaggaaagtaacagtgctagtgtgttgttgaaatgccatgctctgggcatgtgtttggggagagagatgcagtgcgtggtggggaatgggaggtgctcaagagggcatcctctctgaaaggggtgacagccgcttggcgctagctaattattgccacgtggagatgcatcattgccagatttttatgtaaactctttggtttttaaaatgttggcagctcattcaagtatttttaaagcactatgagagatacttcctcatggaagaagaaaaatgcaacttacaatcttactcagtagcatcaactttggctcaaaacaacaacaaagcacgttgtaagtccacactgcaaatggcaaacagaacccgtctaaggaccagatttggcctgcagccctcaatttgcatcttctgtgcatatttttaactggtagagataacagtaaatgatggcaaaacttactgagtcctttgcatgtgctagaaactttgctatactttgcatatatcattcaattctcacaataacccaaagaggtgtctattactattattatcccattttacagacgtgagcattgaggctcaaggaaatgaagtatctttcctgaggtcacacagatgaaatgtgacaggtagctttgaaaccaaagcctgttctcttttaaaatcatacataccagtggatctcagtcctggtggtatgttagaatgattggcgtgcccttaaaaacagtgttgtccaaagtccacccccaagctcattaaatcagaatatctgtgggtgggactcagacgtggctgttttttcgaaagcctcaaatcaatgattagaaatagctgtaagatagataaaatttgtgcctccacatctggcactacctatctcctgtactctattttatttttgagtatttattgttctctgaaaattatgtgcatctttacctgtttatgaattttctacttttaccacactgggatgtaagctccgtgagcgccaggatttagtctttttaagttgtttgttgtatccccacctaggtcagtgcctggcacataatagatgctcagtaagtatttacttgaatgaataactggttcttcatcacagggagcttacactctagtgagggagatagataatacattcttagtcctatgagataagctcataactgggatgttcaatatgactttattaacacagggaatacagctgattatctcttagacattgttaggataaattgtttctatacgtattgaatggactgtggggcatttttggtcacctgcactactacactggatccattctgtgctctggggtgtaagtgtgtgtgtgtgtctgtgcgtgtgtgtaatttcgggaacgggtaacacattcgtattacctctgtttggacacgatttttagtgacagagctaggaataacaggtggaaccttctaagttttgttgcttaaatatcaggccccctcagaattcaggactgatggtagaggatttaccagtttacagggaattcagatattctcttctctttctaggaaagccaaattgttggtcattctgcccccaacatttacagaagcagtttctcggttttatttatccaagattcttatgatgaatagtgttaatatcgcagcacactatgggctgtgatatgcctatatcacagagaaggcaagctgtggtgaagtggaataaatgaaaaactgtctataactctgcttctagatgccccacttaagcaagtaaatgggaatgtgagtgacaatatcatagggataaccttgaaagagtgctagtttttaaacaaaaacaaatcatttggaacgttaggatttaaacagttactgataataaattgcttgtgacccatctgaaaattgatggatcatagtgatagtgaaaatatttaacaactgctatggcccaggcaccgaacaatcgaaaccaactccagtgtaaacagtggtgccatcaagtatgcgctggttgtcagccttgctggtggagtcattgtgtcacgatgaagcaactaagagccagtgctgcacaaagtgttgagagaaacaaacaaaatccagggtgctccccttatgcggagtagagagtagatagagccttgtttcagaacgataaaacttcggtcaaggacttgatcttcccacttattgctgggggctccagggcaaatcatttgttctttctgagcctgagttgttgtttcttcttgttcttcttgttcttgttcttgttctcgttctcgttctccttctcctactccttctccttcttcttcgtcttcttcttcttctctcctcctcctcctccttctcccttctcccttctcctttctccttctcctcctccctcctctccttctccttcttctttttcttcttcttctttttttttttttttttgatatggagtctcactctgttgcccaggctggagtgtagtggtgcaatccctgctcctgcatcctctgcctcccaggttcaagcgattctcctgccttagcctcctcagtatctgggattatagacgtgcatgaccatgctcagctaatttttgtatttttagcagagatggggtttcaccatattggccaggctggtcttgaactcctgacctcaggtgatccacctgccttgccctcccaaagtgctgggattacagtcatgagccaccgcacctgtccggagcctgcgtttcttctaatatacagtggaggagagtaatttttgcattacctactttgcaggctctggagttagattgagcgcacctgaagctaaggttaaagatgatggctatgggcatgatgacagtaattgttcttctctggttggggactgattgatgatccctgatttctctgtttaaacgttgcccaaaacaaaggttgagaggtccttaggggagaggcgagataagcagaggtaggacttgcctttcttctgtgcttctccagaattagttgtgtcctgtggcatccacagacaaaaattgagcaatctccttcatagttgagattgtataattcgataaaataggtttaaatagccttatgcctgtataatattcatgaaaagtgtcatgagtgaggtggcttgcttgttttgaaaatgggctgattttgacaaaggggaaaaatcgggattcatttactgtaagttgaaagtaagaaacaacaaagttgaatattagaagaacttggctatcgcaaaaaccacatactttcacatcagtaaaacatggagttctgatctgagtgaaatgtgaaacttcttgcagaccacagagagtaaaaaggagtacttttgtttcattattaataccattgtccttatttctttaaatgagaattgataatacccataacagaatctttcacacaggccaaaaacagaaagataaattaaacaaaacaaacaaacacccaaaacctcaccaccaccaccatgactgccaacaaaacccagtgctgtgaggatgcatcagctttaagatctctttaagtcattgtgttctagagaaaggggttctttatttgtttctatcaggatagagtgagtttttgttaaagttgtctttcttttttttttttttttcttcttctggaagactgacgaagttggccttttgggatattacaagaaagataactttgtcttctaatgtctgcagtgatatgaggcaggtgactgtgtgtattctgtggtgatccatgttcacaaggagagacaggccaaggatgcccggttgatgagtgcgctataggtgcttgggagtgagaaggcaagaaagcaaagtgaacttaaaaaatagctagccagtggaattgagggagaaatgctcattctttgctgacacatgaaataattgttgagggagagttgctcaatctttgcctacacattgaaataattgtgttgaagagtctatgaaaagggggtcaatagatttgagttttcatcactttggccaccacctaattatagatggcctccactgtgaaatatgtgagttgaaatagatttttttaaaattcattttctggactggcatttagaatttgagtttattcaatccttgcttcttgggcagttagggtgtcaatggcaataggaagggtagctgaggccagagtggtgggggtagatgttgggtggaatgtgtgtggttgagcagagcattattattattgctattattattttttaaaagaatccttatagtaaagagagccaacattgattgaatatatgttccttgccagaacttgggctaagtgctttattataagttatcttatttaattttcacagagacctgttgaagtgtaagttttagctttctgtttcacagctgtggaaactgaggtgctgaaaggatgaagaacttccaaaaagtcgaagatattaagcagctgtattagtcttcagatcctgatatctttctcatagttattctgatatgccgtattaagttgcagaattgaggccgggtgcagtggccccaattttttttttttagttattcttattttctaattattttatatgctctctctctctctctctgtctactgtcaaatcccggcactatgggagtctgcagtgggaggatctcttgatgccaggagtttgagaccagactgggcaacatagtgagaccccatttctacaaaaaaatgaaataaaacaattagttggtcatgatggtgtacacctgtagtcctagctactcaggaggctgaggcaggaacattgcttgagagttcaaggctgcagtgagctatgattgtgctgctatactccagcttggataatggagcgagaccctatctctaaactaaactaaactaaactaaactaaactaaactaaactaaactaaactaaactaaaagtaagataaaataaacttacggagttggaacattgcaggctatctatctggcttccctgccctgaattcatcgttctctttgatgtgctattgtccaacatttcttttttttttctgttttttttctgttttctgtcttgctgtcacccaggcttgagtgcagtggcctgatgttggctcactgcaacctccatgtcccgaattcaagcgattctcctgcctcagccttctgagtagctgggattacaggcacccgctgctatgcccggctaatttttgtatttttagtagagacagagtttcaccatattggccaggctggtctcgaactcctgagctcagatgattctcctgcctcgacttcccaaagtgctgggattacaggtgtgagccaccgcaccaggcctttccaacatttctttaaagaaactaaaaattaatttgaataagtaacacaaaaatatagtttaaactatagtataaaattcaaaactatgcaatgacaagtacatctttattttatctctttacttctcccacccagaggaaagtataagttctttatatatccttttagaaataaactgggtataaataagcatgtgtatacacacacacacagaaacacacacacaaacacacacagatatgtatttatattccagtgtatataaatacatttatatacatgccatttatatacacatttgcatttctgttattagcgactctaaacaccatttgaaatgagccgtacccatttgtaattccgttttctgaactgtccttcacttccttttccattggattgctgaatttttgcttattgatttattacagttaagaaaattaacttgtagtctgtgacaggaattgtaatgctttaccattttgcatttcttttttaacttgcagattaaaataaaaagttttatatagttaatccttttttgattttatgtttctttgattttgtgtgatgcctagaaatgccttccccactttgtgatatttaaaaagaaatttccaatttttcttctagttatttcttctgctctttctcaaatctttgaaccattgaaattttattttggtaaaaaatgtgaggttaggatttattttgatatttttctggatctgcatttctaaacactgtttattgaggagtccatctctttcacactgatttgaaaagctacctttattgtatattaaatttcttaatacttaagtatttaatacttaagaacaccgtggaatactatgcagccataataaaggatgagttcatgtcctttgtagggacatggatgaacctggaaaccatcattctcagcaaactatcgcaaggacagaaaaccaaagaccgcatgttcttactcacaggtgggaattgaacaatgagaatgcttggacacaggaaagggaacatcacacactggggcctgtcatggggttgggggacgggggagggatagcattaggagatatacctaatgtaaatgacgagttaatgggtgcagcaaaccaacatggcacatgtatacatatgtaacaaatctgcacgttgtgcacatgtaccccagaacttaaaatattaaaaaaaagaaaaaaaaaagaatttgcatctatttttagactttctgttctattcatctgtcacttcatgtgtcattattatgctttcaattattgtagctttataatatgttttattatctgacaaagattccccattcctattagtttctctttttcagaaaatttctggcttttaatgcctgtttatttttcattgacctttataatgaacctatctagttctggctgggcgtggtggctcacgcctgtaatcccagcacttcgggtggctgaggtgggcagatcacttgaggtcagaagttcaagaccagcctggccaacatggtgaaaccctatctactaagaatacaaaaattagccaagtgtggtggcgggcacctgtagtcccagctactcgggaggctgaggcaggagaatcgcttgaactgggaggtggaggttgcagtgagccaagatcccgccactgcactccagcctgggtgacagagtgagactccgtctcaaaaaaaaaaaaaaataaaataaaataatgtaaaaaagttctgttgatatacttatgaggtttgctgggtttatttgttagcattacatgctatacattgtaaaaatgttgattctttttcttggaatactaatgcctttccatttgttgaaaccttctttgatgttcccaggagcactgagatttttcttcatgtagaccgtgcctgtttctaataagttaattttgtagatattttctacttgctctagttaatgtaattattttctatttcatttaattatatgtgtgtgtgcctctgtgtttggggtctggatttcagtacattgattttctgctcagccactttactgaattgtctcattatttgaataattttagataaattttttttgagtttctagttaagtaagtatattatctgccaataatttatcctttctttccaatttttacaacacttatagctttcttctaactgtactaatacctctagaatagtaaatattaaataactgtggttgagtaaatgtccttcttttgtgtctgagtttaatgggaatgctcataatgttccctgttactagtgacattggctttcgatttgagaaatgtattgtgttgaaaagtatccacacttattttgatagtgttgttattgttgttgttttaattgagactggttgttaaaaggttatctagcttttttttttaaagaaactttgaaagtaatcatatattctaaaaaaattttatgtttttctcttttgtcctgtaaatttgctgtaatatatgaataaaattttcaaacatgaaatcttgttagtattcttgctaaaataattatcaacttgttcattgtttctgtattatatatttttagtgttgctagatcctagagatcattaatatattaatgatctgtgcttcaattttcataagtgagattatttgaaaattctgtgtgtgtgtgtgtgtgatcgagaccatcctgaccaaaatagtgaaatctcgtctctaatgaaaatacaaaaattagctgggcatggtgtcatgcgcctgtaatcccagctactcgggaggctgaggcaggaggatcgcttgaacccgggaggcagagtttgcagtgagtgagattgcgcccctgactccagcctggcgacagagagagactccatctcaaaataaacaaacaaacaaacaaggaagcttttcttttttctttattttgaaatagtttgataacatttacatgggttatttctttaaaatatggtagaattcccttgtgaaaataccttcacttattgccttttttggagtgaagaacggagtgaagaaagttatttctttaaaatatggtagaattcccttgtgaaaataccttcacttattgccttttttggagtgaagaatgtgtttgctctttaaaattttttacattttttttctgtagtaattggactaattagcttttatatctattctgtgattacctttgttaaattatagtttttttagggaagtcacctatttcaaattcatttgcatggtgtaaaataatttctcatgattgttttcatttcctctgtatttatggttatatttcacattattatttaaagttttatggatttctgctatgtgtatccatctttctggctaaagcatcagagtttaatttattatttatttaaaaaatagcttttgcatttatgtgttggctctaccactttgtaattctttattttctctttaaaatcttcaataataccttctactttttctaggtttattttgttgtttttctcattgtttgaacttggctcttaatttccatatttttatttctgcttttttattcatataaataagatataaattttcctgtaagagatgcttatttgtatgccttaagttttgctaaatagtgtttttaatcttattttttagttatttgactatgcacaggttcttaaaatcccagacccattagaatgtaagctttgtagggacaggaaccttgtctgtttatttattttgggtctaccgttgtgcctgtcatatatttcttaagcacttgctaatgtgcttaagaaatgcttttgtgtgaataaataaatctccagggaattatggaatttgtggctgattcagtcctgtaactctagttcgtttctgcctcatttggatattctctctaggtatctactaatgtgtaggaataagaacatattagacatgcttcaaattacctttttaggtcatgatattaatagatttattttaaaagtctacatagtttttctcaaatcaagtatacctgggtaaaaatgtctttctaaagattagcctgtctgggcgcggtggcttacgcctataatcccagcactttgggaggccgaggcaggcagatcacctgaggtcaggagtttaagaccagcttggccaacatggtgaaacctgatctctactaaaaaaatacaaaaaaaccagccaggcatggtggcaggcacctgtaatcccagctactccggaggctgaggtaggagaaccatttgaactcaggaggcggaggttgcagtgagccaggatcgtgccattgcactccagcctggacgaaaagagtgaaactctgtctcaaaaaaacaaaacaaaacaaaaaaaagattagcccaatctatttctagctacttgggaggttgaggcaggaggatcacttgagcctagaagtttgaggttacagtgtgctatgatcatgctacttcactccagcctgggtgactgaccaagaccctactggaagaaaaaaaaaataagaattgctcaagaaaaaatacagttgagtagaattagaatgctagcagtgttgcaatagcagagatcacatgatgcccatgatgtttgtgaccttggacactttaggctaaattttgcacagaagcccaagtccaggatagaaatgataacgatgaacctgctgtagtgcagggaaagatgcagagctggggggaagcccaaacccctactgatggccactttttcttctgacctcttcctatgtctcatttaaaaaccagtagctttacttcgaaaactcaattttcagatgagaatcaaaacaaaaatgcaaagaaggcaaatgattcataaaagttgctgagtgaattagaactataatgtgggacaaacactccgcctttctgtctctgcagctagtggtatttccaggttcccagggaacctcctgtcccttgctccactgtgcatttttagatggacctgatatttggttacctcccttgtcaggcccaacaatccttgctaaggcacagacttgtgtatttgctgatccctgaggggaaagctgtgattcaggctctgaagtctaagaattgcagacttagtttcttgtctcccgatgaaactgctaatctgggtgccaatggtgtttctgctacatggacacctgcccacacagcatgattagaaattataatgatgacgacgatgagtcttccaggacacccacgttctttgcaagatatttctgctaatcgtttctaccagaatcagttggaaaacttttttttttaagttttttttttttctctgtatctaagtcaaccaaaaatgctggtctaattcaggtatagattaaaggtttgtcctcaccattaatggtgtgttattattcatgcagggcatcctagaaccttgggcacatagtgtaatggaaagcacgctgggccagggagatgtggattcaggcttgagcagtgccaaaaattttcgttatggccttggtaaaggtgatttcccatctctgtgactttgtgtctccttctgttaaatgggcattcaaatcttttgtacctaacttattagggccctgataatcaaattagccaataagtaagaaaatgttttcttaaccacactgtaaattaagaggattcatattgaaatcacttttccattattgctgtcttagcctgctaaagttatatttagtgtagtgcaactaagcagggttgtgagagctgggaaggtagactgttgtattgggcagggtcagggcagataaaggaccaaaataatgcctgaaatgctgtattaacctgctctaccttgaactgctgtcttgaattggggggaaaaatgaagctctgaggggatggtgcacagggagaaaagagagaatctcaggaattgaaagtctcaatggagaagaggtgggagaagaataggaggctagagtgagggcatgtgatcgtggagtaccgatctggagacaagagaagaaagtagaaaaatgccagcactgtctttggaccctgtgtatctggagtgtgggaggacaggcagacacaaatagagaggctctagggaaaacagcattctcatagaagatccttctccacaaaaagccctccaaatgtcctccaggagggtagaagctggttttaaagctcctcagggtcaggaagatccttctcttatttttctttgcatcgtgcagtttaatttagcacagtactttgctcacagcacttaaaaaattattctgggccttgctttttaattttaggcccaaatacctgaaaaaatgttcaggaggaattctgataagaaagagctaacttaggcaattccatttctttttttggttcactgtttcctcatctgaaaagtgttgggctccatgacgtggtttctatgacactcagtacctttgttgaagagaaaacatttttctaaaactaggatttccaaaaaaacaaaaaaaaaaaagaaaaacaaaactcatgaatatgtggatatttttgtgatagtgatgaaggtttgggaatggagtagaatgtttcctaaagtccttttcttttagcagaagacttgagtttgtaaactcggctcatataatttcagcttgcctgtctaccttccttccatctacctacctacctacttacataagtacctacttatatatggagaacacggtggaatttaatttttcttattcttttcgactttggttggcttggtgaatcaagtaaactgtgttgaagaaaaactaacttttgagggaaaaaattgaaaaaaaattatgattctttttttttttttttttttttttgagacggagtctcgctctgtcgcccaggctggagtgcagtggcgcgatctcggctcactgcaagctccgcctcccgggttcacgccattctcctgcctcagcctcccaagtagctgggactacaggcgcgcgccactacgcccggctaattttttgtatttttagtagagacggggtttcaccgttttagccgggatggtctcgatctcctgacctcgtgatccgcccgcctcggcctcccaaagtgctgggattacaggcgtgagccaccgcgcccggccaaaaattatgattctttgaaaaggatttttctcaggttagtttatatagtttcacagatgcttgagataaggattagaaagttcagacactgaatctccacagacccctgtgaatgtgttggctaagcaccttgtcttctcaggaacacacactggaacagactttctttcagtaaaacagggccagaatagtctttgaaacatccaacggtggtttgggaagaggattctctatataatgcctgtccaaatacagaataaaaattttcaacaattagcaaaaatgtggatttttcagttaccaattccttatttggcacagttggtctttctcatcttattcattcattcatttatttcattttatttatttacttttaaaatacttgtttaattcacctttcttgctcccattgagccttttaactaatcaaatgcatttgaaatgctattaatttatgataacagtaagacccaagacatcactttatgtaatatcttgtattgtagttcattgttgtcagctctttttctgatggggttttgatttagctggaggcagtttaagggtgttcattccccaataatgtttgtctgttgaagctggtgagctagactaacagtacaaagagttcctgtgtacccttcacccagctttccctgatgttaacatcttatataaccaaagtatgtttaagcaaagaaattatcattggtgtaacatgactaaagaagtgattatatcttttattggcagttttccagtttttccactaatgcctttcgtttttttcctagatctagtttaggatgctgctgtgcatttagtcatcctgtcttctttgtctcctcctgactgtggctatttctcagcctttccctgtttttaggaccttgacacttttttagtgtaacggtcaggtattttgaagaatgagtgtcttgcaacttgagtctgactgatgctttctcatgattaaattggggttttagatttctgggaagaccaccacagaggtgaagtacgcttctcattgcttcatatcacagcgtacatgatgttaatgtgagttattactggtgatgttaattgtgatagtggccagttttgttttattttattttttaatagaagaccagttgtctgggactatacacactccaacacatttgcaaattggtggcaatgattattgactagtcctcaaactactaacttcatgataatggaaagccgaaactcccaaatcacatggacctcaaagttcaattagaaaatttggttaggacctgacgacaatgttgcgatttgctacagcctgccctgcagtctcaactctggggtcccctcagtggtgagctcagtcacagtgctgcttctgtgtatacttacccagtaaacaacccaggcattggggcctgtctcagaaaccacatctccaatagaaaggagaacacttgggaaagcaggaaggagtaagaaacggaactcgcccattcctgacaactaatccttttcctttctaagtatggcttagtggatgtcagccattcactgttcaggacaggatagggatgaggagagaattctttttcatttgacaaggacattgaattttccttatccatggatcaagactagaaggtatggagaggaaaagggcttctcatctctttctttcagtagcttcatgcactgatgcatcgtacttactgaatgttttaccttctctgtgctcttctcagaggatgcacagaggattgggaagaggaagtattggtgacttgatctagaaaaaagagattgtttcaagccacaaaaagtttgagggtaaaatctcaagtcctgtgtgtgatgaatcagtagaaaaggtatcccagtggccagtgtgagtaagctgtcatattttcggtagtaatccttggtcctgtttgattttcctcatcctcacatataagatggagccatttctccctctggcgtttgccatcacagtgtcctgcagtctcttggtcttgagatagaaggttgagagaaacactttgcagtattgggagaactgggtctgcctgtgggagtacttgtatctcaatcaatattacagaacttggctccttgtttccaacaaatgttttgctctgttctcatcctgggagttgaaggttgaggcgaggtgggagatgtgctgtataatatggcagccactaaccacatgtggctgttgagcacttgaaaggtggctagtgccacatgttgaaaaataatattttggatatatttgtaaaataatttttttcaatgagccttttgaaatgtggctactagaaaattttaaatggtgtatgtggctcctatgataattctattggatggtgctggcttagagcctgggaagaacatggatcagagtcaattgaccttgtgttctcccctgagttctaataatattgtcattaaaaggagaagcttcaacagccataattttcattttaaaaagtctaattcagaagaattggctcattttatattattgcttggactggagaaaaatctgacatttggtattttcataattgagaacataacttgctgacttaaaaaaaaaatcacaacattttgtgcttggccttaggtaccagcctttgagctctttgaaaatagggattgggtctttttctctttctaccatcctttttcccccaaaaccacacactaacacgtagaagatggttaactggcatttgttgaaaaccaaaataactttaaatagagaaaactttgtgaagctaccttgtatttatggttggaagagtgaaatacctttataaggcatcccattttcttaagatagccagcaaaaatgaagaacattgatccaagtgtttatttacttattgatttaattaccattctcatcaggtgtccctgtcatctcagcttatgataaggaatcttttcaagatgcttcacctcatcactctctaggtaaagggggacagaaaaggatgctgcttacatatacgaatccccatctttgctcagatattatgtctaagggcctaaggactggataatcttattttttctgtggcttgatcctttccaacatttaatctatggaggttgtgaggataacaatgaaaaggcaagtttaagcttggactgtagatacttttcactgggtggttttattttattatgcttcattgtgaaccagagcctctgtgaacatatgacttataggccctcaggcttccactgtgtccctttccctgattcgtccttcttcactgcatgccctggtgttgggtgagggagcaggctttatgtgatgtcattttctcagagccctgagctgggaaattcaagagtctccatgattcctagttaggcatggaagagaccctaactggtccctcaggaacatgtttggttggtcagaggtaactcttatagaatctatgatggcttagtcgttcactcttcctagaaaagacctctttaaaaaggccttttggttatatacggcctgagttttaagtaatatttgcaatgttgattctctggtagaagagaatgaaaagttgtgagtgctcttggaagagtgccggacagctgtagtgatgggaaaagtattggccttggagtcagacctgtgtttacttcctggctctgctattttctagttgtatgactctatgcaagtaacttctcatctctgagcattaatttcttcacctgtttgacatagacaatgtctgcctcacaaagttgtgatatgttaatgtatgtgggatacctatctcaggacccaatacttagtctttataaaacactaaatgaattggttttctcatgtatgtcttatggttttgctggtgatggaccaatagtcatcttccatcttcactttagaggtgggggaaaagggcattagagtgattgtgtggtaaaatccactctaattctagctgtgagaaaaagagcggtgaaaatgtggtaagcaattgcttctaaaaagcttggactaaaagcgcttgatggatttgtgctggcttcccggtagactcatctctgtactgcccgcacagcacaattaattgttgttactagagaaggaacaaataaagaaaagagagagagcagacataaaaacatcctttcatctttctgaagacagtcccctttgtcagatcagtggagctgtacctgtgaatcaccttgggaaagcacagtgtgggtaactagaaggaaggtcttgtggctcattttgtacccacttcctgggctggggaaatatctaaactaacctttcttacttgtcaatatctactaccgttcaccatgcatcttcacagatgagggcctctttctcacatcttcactccaaacacattactgtgtagacagccacttattttctgggaagaaaactttgcaaagcagtagcagaataaagtcgagggtaaacagaggccatggaaaagcactagagtttgagtgcagagacatgagtctgagcatgagcagtgaatagctcatgaaacactcaagttgcattctccttatgtggaaataaaataagtcatggttgttctatgcacgtggcacctgaccttgggtccttattgctatgctgctagagtctatgaatcaagatttgccagttgtgatcttgaaatttagtcagattaaaagggaactctgactttgagggtgaatgccccaagtgggcatcttattctcctatggattcagcttgttaggcagaatggaagtggaggtcatagattttagggttttctcctgggattgaatccagctgaagcaggaatgattctgggtgagctatataacgtctctgagcattagtttgtcattttcttacataggaatagagttattgccagatttggagatagtacatgttgcaatgtggttgacacagaataagctttcaataaatgattggtattgttgttgttgtcgttattatctataactacaataatttccctagccttattttatagggataggttgtggcaacatgaaatgtgacttggaaaactgatttgcactagatagatagaaaccatgtttttctatctatataatgaacaatgtcatttaagaaagcttagaggcaattccaccagcaccatcttcttttttatttccattcctagattatttgccctcaagtctttggtaatttctttttgccacatctcttgaatgtttcttctttactatattccatctattattaccataagtccaacgttcatcacctcctgctccactgttgttcctgtctcctggctctcctagagccttggttctcaaagtgtcattcacagagcagcagcatcacccgaaatgcgtcatctcaagatctaccaagacctcctgaagcatgaggcatgttcacccccgtgttgtaggacctccatataactcatttaactacttctcctgctcagagtacatgcttggccagtgcgtgtttgttctgcctccagaatgttttctgactctgattgctatcattacttcttttgaatctacctaaattcaagttaccatccattgccatgactatggcaatagtctctgaaattgtcttctacttttatggtttccccttgtggcctttttccacaccatctggagagatctaaaattgttggtcagatcatatcacacccctccccttaagccatacggtggctgctgtagtatctgcagaaggtccctgacttatgatggtttgacttacaatttgtccacttcacactgagtttatctgggtgtaaccaaccccatagaaatcaaggagcatctgtagaaatgtttgaaaggccctttcatggcctgcaaagccctgtgagatgactctatgttctctcctttttttttctttctttattttttttgagatggagtctcgctcttgtctcccaggctggagtgcgatggtgcgatctcggctcactgcagcctccaccttctgggttcaagcaattctcctgcctcagcctcccgagtagctgggattacaggcaccagccatcacgctcggctaatttttgtatttttagtagagatgggttttcaccatgttggccaggctggtctcgaactcctgacctcaggtgatccacccgcctcggcctcccaaagtgctggaattacaggtgtgagccactgcgcctggcctctctgcttttttcataccactcatcactttacacagtaatctgtagacacactgaccttcctttagccctctgtataagccaagctttttcccacttgatctttctctgattctgtgcaaaactggcttggaagtatctttcaaggcttagctcaaatgttaaagccttacctagctcttccccattctttagctaaagtagcacacatacccccctccccatcattcttctgtcattatcttgctttatagtctacaaagcatgtatggttctctaaaagagtgattaccatgcttttgttttctttatgtacattgcaaactgttttggtgagaaatattttagtaataataataatggtgaagatttagtgagtgtttgctataggctaggcacactgtatggtaaattaaataatttaatagatcatttatttggattatttcattctatttagctgattatatatttatattttttgtgttcctcttgttttaggatatcagcttcttgagagcagggtccatgtttgttgcatctgtatctccgcctgtagaagattctctggcatagggatttttgtgcaggaagtgtttattcaggaactgaatggatctcagaagattatcatttgggaatagatctacatgacaagaaagaacaaagagtctctctcattctttttcccagatatatcccgggagaaaataccctcgactttttcttatctttaatctgagaaggaagcagttgttggaatctgatttaggattggctctagtggccctgtgtgcagacacagatcttgggattcatctgaccatttggggagagaggttcttgaggggcaccttgatgataacgagtctttctaaagctttaagtttggcgtttgaggtggttggaaataccaggtcttccgacttttacgttctttgtgcgcacgctggtgatgtgcgtatgtgaacctttattattatggactcagccagcagtaaccatggtgagtagacctatcacacagcatttttctgagtcagtttaaaatgctgacaattaaatataccgtactcttttaagcaatccatcagtctctcttgttgtcatggtgaccggagtatatttagaaatgtgacaagtacactgagttcaattgcacttttgccaaaacatagttttgcagctaaaattgaatttcctgattgaagatccaagtgctgttaagggggcatgatcgtttctatacattattctggaagtataacttaacgttattctgttaaatccacagttacgagtcttatcaggtattgatagttaaagtggttgtacttaaagttgatgaaataaagtgaaataaaagtgacatgatgctttttctattgaaaatgaaactgggccttactaatataactagtttaatgattagtttctttatatatttataaagacattgtaggtatgtacctgtctgttcttcagaattatatttctaatttaaaattatatatcatggagatcctcccctgtttcctgcttgtattctattcttagtattgtgagggcattcttttttctttgggtctgacctctgtttgataagcattcttatttttcctcaatctcaattcttctggattttaaatgaagtaaagagacacaatgaacgtgactttttgcccaaacaaaggaaaaacgaaactcttctctttattcaagaatgtagattaaattcttactttcttatcatcctctgtcctgtcaacatagtgctgagaatgatgttgtgtatcaactcatttgaccacataaagtttaggaattaatgtagtggctgggtcatgattacaacactgatttcattcctggccaaagactgattcttctgctcttgaggtgagaaaagccagtactcctggatactttcgcttctctatttttatctaactgaatgagtctgcaactgggatagtttatgagcctctaataatatacggttagactaccattatctctttcgtgaacattgccaaaagtgtttttttggtaagagatatcttagttataataacagtttgtaggatttatggagtgtttactacatgctaggcactgtatatagtaagctccttaatggatccttatattggatctacacagaaatcttatgaggtagttcccattgtattcttattttacgttaaagaaacaggtttggagagatactgtcttttgaagaagcatataagtggagcagtagtggagtctgaattctgatacaggtcctagtaaccactgcctgttccatggaaggcacacagtgagtattttttttactgaccagtggcctcttgtatggtgacatcatacagatgtttcagtgtttccagaggctcaagaaagtagcagctatataaagatagacaggtagcagcgtctgaaagtagagatgagctactctttatctttcctagtggtttagagccaaagtagattagtgctagggagagagggaacataagtcctgtctagttcagtggtttcatctctgaactcctttatgttcttaaaaatgagcttttgtttgcatgcattatgtataatgatatttaccatattcaaaaaagtaagaaatgaaactacaattttaatgaaaaatatttgtataaaaaataaatatatttgtgaaaaaatagtgacaaaagtgggagctggattctgcatttaatttgttgtgaaatattgttttgattgatgtttatgaagaaaatccagtctctcacagctatgtatttgaaaaaggaaggataaaaagtaattgtggattttcttctttgatactataccaaaacttgacagttttcacattacctaaagttagtagtttcttataggttagtttcaatgtggaatgtgaaatcatattaatggactttttataccctattatattaaaatccattggtcaaattttcactttgattgagtctcctatgattttgtaaaatcatgcattggtcatttagaaagtcgttggtcactcacttattcagttcttgcaaacactgatcatttcattctataatataaaaagtcatcttcattaatatcactgctcattcatcaaaaaagcatttgaaatattagaaaggtgtcaagtgcacagtagtagatgtaaggttttcaaaattctgatttttacttgaaaacatgaattttatttttggctacaaatactgttgttttccttgaaacgataagctctcttgctttatttttgagaaaatctccggcaaaacccacatttaaagaaccatagttcgtcagtcattgtttcaaataaaaatgatgttccatgaaaaaagcgattggttagcagctgtcaatttaaacagttacacaaagtgcatttcttagagacaatcatcgtagtttgatcttcagcaggtgtttcatggtacttcccagaggtcacacagaatgtaaaaaagatgtgtactcaagaatattaaaaatatgtctactttttgattatgctaacattttatgtgatcaggtttctttagtaaaacctagtcagacagtactcaaggactgagatttaataagattgatacgtttcaatgcattaaagagagtcttaagtgaaactggctccctgtcccgcttattgtatgtgtcttacagtgaaatcactcccttgattcactttaagactgcaacagtttttttacccactgttatttttgtagcattaatgtaaatttcaacacagggaaacggcttcttagtatgattatgaaaataattttgaacttgtggactcttgaaaggtctaagggactcctacacatgtatgggtcacacattaacagccactcattgagtccagtcccttcatttgacaggagaggagagtggtggaaagatgtgtctaagatggcagcacaagttagtggcggagctgggacaagaacctattgttacttaactcttctttcttttcttttgatttcctgctccactttcaggaatttaaaggtaactcaaggaattccaaacttctttgtcagagatggtgatgacaaatatatatagtttgtatatcttttatctgaaatgcttgggatcaaaagtgtttcagacatcagatttttcctaattttggaatattttcattaaacttactggtttacattcctgatcaaaaaacatgaaacccaaaatgccccagtgagctttcagcgtcctgtctgtccttgaaacttctggattttggagcattttgaatttcagattttgggttagggatacaaaacctgtataattattgaactttttgggaataattccgttttttaaaaaatgttaaaccttttgcatattttccctactctccgctcaccactactatctcttctgcttttcaatggtaaccactcatgcctttttaaacaaaacatgtgttgtatttgccaagacacaggggaagcgaagttaaaggtacagttgactgttcattttctgaataagatggaattctagctttgtggggaaggaagaatcagtgagttttcgttgaaggacccatgccattctttacctaaattaaagttgttaaaagtcacaggaaagaaaattgtgcaagcaattatcatcctttatatcactataacccatcttactaggcaaactgtgccctttgctccccaattattctctattaaagtttcttgctctccctccccatccttctctttctctctccctgtctcctcccctttccttctagaaagaggttgcccaataaaacttgctcttaactttgcttttggttatgttgatattttatgtgacttgttttcttcactaaacagtagtcagtctatgagactgtattgaagaatgctgagaaagtcaatagaagtggacttagaatactacatgttcttttaaatatgtctcttatgttatagagtaactttttggggagctaaggtttgcagacaatgctgcgtgtgaacatatgtgagtaaatctgataagctgtggaaggaggcttgcaaactttcaaatgtattgtgctttcattttcaacttaattggatgttcttttgcaaggtcttgtttttttcctagttctcattcaccgttcagttgccttcccccacctgtgagctttttgagtcaaactttgtttattagcttttttcctgattcttctttcatgtctttctttcctatcccaaagtatgatttgattagacctcaggttacccttctgaatgagctcttcctcaatcctaggcctggccaggcatggtgcctcatgcttataatcccagcaacatggtaaaaccttgtctctacaaaaaacacaaaaatgagctgggcatggtggcccatgcctgtagccccaactactcaggaggctgaggtgggaatatcacttgagcctgagaggcagagattgcagtgagccgagatcgtgctattacattacagcctgggcaacagagggagatactgcctcagaataagtcagtcagtcagtcagtaagtaagtaagtaagtaagtaaataaataaataaataaataaataaataaatacgtaagaatcctaggccttggtgacttactctttttaattttttttcccacaaaactgatgtgttttgcccttactttcaccagaagaccatttagtcttcttattttttcttcctgagacttctacatttgtttttttctagccatttatattaggctcgcaaattgcatagtgatagctgattgaccccttcaaaatgcctgttttctgcctccttgtctcagcttcttgaggatggtgctatctcatgcttggtgtatcataggagccccatggatatgttgaatagattttgctcaggggtctcctctttagagagcgttcttcacatttttatctggagatctgagcttttatgtatctcccactattgggctgctaaatctcccaaacccagaattgcaatgtccatcttttaatgcagactcccagccactgccaggatatcacatgtcttctctgacagatggctatgtagcctccacttgaacttttgcagctctttgcaaggcaatttgttctactgctggacagcttcatgtttaatgttttcccttgtattacactaaaactgattttcccattattttaatccccatatttctagcattgcatagtttgaaaaagtataatattgcttacacatgacatgtccccagatactcaaagatagctctaattcccccatctgcctcctttcctcctttagaccttctcttgctacttacatcccatagaaggctttggatgctcatcctcttggtgctttccccatttctacatcactttctagattttggtcctgatgtccaactctaagggactccctcaaggccacattttatctctgatggtactaggagcagtatgagtaaatggtatgtgtatgagtctgaaagctgagatatgaattctggtgcttattagatgtgtgaacttgattaggttacttaatctttctaaacctcagtttcccaagatgcaaaatgaatataatattaaattccaagactatttttaaggattaaagatataaaatgcttagcttagttactaaaatatattatgtttagcttgatcaattatttcatcttttatctatccaacaactccttttctttttcacacatgtgcacttggttttaaaaattatttcaagagttcttccctcctcctttccttctctcttttcttctctctttaaattttataacgtatatactcttataaaagttaccatcatgtttagatttccttctaaacttttatatctagaatttaacatgattttcttgacaaatatgttttcttctatgtgaattttcgcagctgctgcctacatttctgctcatgtgtttagcctctgttaatcttcctgtgaaaattgtgacttcatcctgccaatgggttaatgatgactggctcattgcatgtcacttaactcctcgctaaatgcttcacttgatcactcagtaactttacaatcatttagttgtacaatacatttaaaaaaattaaaagttcaattaatttcaatttcacaaacacttactaatcccatcttatatcacatgcattaaactaggtgtgtgttatagtagttgcatagaacattttgttcatttgctcattcattcattcattgaatgttcttttgagtacatactaaagaccagatgctggatagactttgggttcggattcaagaagctgtgttagacaaagagcctctattcaagatgcatgatcaactaaaagtgataaaacaatatggtaattttagtgatccagatataaaactaggcattatggtagttttaagaaaggctgcttcatcgaacatttttgcattaagaagcttcttatcggggagacactaaatgttgagtagggcctcagactctactagaaaggtaagacccatattagggcttggttttgtttgattataaagccattttgtgagaatcaacctccaggctccatgtgttatctttggctcctcaccttcacccccaccctcccaccccagttgcatgcatgccatatttttccttcttcttttcaataaggaagcatcagaatcaacagaataacataaagataggtgtggtgacattataggctcacttctggggcgtcattattacattaatttttctatatttccaagtaagaataacaatgtaagtacataaaaataatctcatgatagtagaacatattgcatagtatttctctattcatcattccctttacttcttgtagaaaagcttagtgcttgtggatttccttaaataagtgtcttaagcactgtatctgatctgatagatattagcacaacaattggcactgagtaattatatttggagaatttggaaggaattttttctctattgcaaagtggtcatgctgtgttgtctgcttttatttatatcacaagaccagatctgccgttaactagatgtctaggaaagagttcctttactactctgtgccttagctttgtcacttgtcaaacgagaatatactaggaacagtatcagttttgcctcactgagctgcagtgaagaataaaatcatttatctgtgtgaaaggacaatgcatacagatggtaacaattataaatattaaactaagcttttgagtgaccggattggctacttctcttaaagtgagttctgcttaattagttaattcttacttattgccccaaactttctgagatagcttcatgtttttttcctctctaccctgaagtgcctgcttgcaagcactatatgctcaatgagcatttgttgaatgaattttttaaaagtatttaccttttttgcttttattattattttaaattaacacataattgtacatgtttacggggtacagtgtgatattttgatacatgtatacaatgtgtaaagatcaaatgaaggtatttagcatattcatcacctcaaacgtttattatttctttgtgtttggaacattcaaaagccactcttctagctacttgaaaatatacaataaattgttggtaattatagtgattctatagtgctgtagaacactagaactgactcctcctttgtacttttgtatccatttaccaacctttggctatcctccccctcctgctacttttctccacctctggtgatcagtattttactctctatgtgatcgatttctttcagcttccacatatgagaaaggacatgtgacaaataactttctgcttctggcttatttcacttaacatgatgtcctccaggcttatccatgttactgtgaatgacaagatttcattcatttttttatggctgaatagtattacattgtaaatatataacacattttctttgcctgtttatctgttgatggatacttagattgattccttatcttggctgttataattagtgctgcaataaacatgggaatgcagatatcttattgaaaatgttttttttttttcctttggatatatgaccagcagtgggattgctggatcttacgatatttctttcttttttttttttttttttttgagacggagttttgctgtgtcaccaggctggagtgcagtggtgctatctggctcactgcaagctccgcctcctggcctcctgggttcaagcgtttctcctgcctcagcctcccgagtagctgggactacagacgcgcgctaccacgcccggctaatttttgtgtttttagtacagacggggtttcatcatattggccaggatggtctccttctcttgacctcgtgatccgcccaccttggcctcccaaagtgctgggattataggcctgagccaccatgcccagccaatatttctaattttagtgttttgaagaacctctatactattttctataatggctgtactaacttacattcccaccaacagtgtatgaattcccttttctttgcatctttgccagcgtttcttattttttttgtctctgataatagctattctaacttgggttagatgatatctcatggtggctccattttctgtatatggatgtccagttttcccagcaccatttattaaagagattcttcttgtttcctttgttgaaaatcagttggctgtaaatacgtggatttatttttgggttctctgttctgtcccattggtgtatacgcctgttcaagaactatcttgaataaaagtggtaaaagtgagcatctttgtcttgttccagagcttaaaagaaacctttcaatttgaacgtgtccagtatgttgatgactgtgggtttatcatgtgaagtgtttattatgctgaggtaaggtatgtttcttttatacctgacttgagatattatatcatgaaggaatgttgaactttatgaagtgctttttctgcatctaatgagataatcatggtttttgtactttgttttgttgaggtaatgtatcacgtttattggtttacctgtgttaaactatccttgtatccctcggataaataccacttgatcatagtaaatgctcctttaaatgtattggtggattcagtttgctagtattttgttgaggatttttgcatctatgttcatcagagatcctggcctataattttctttttacatgtttgtccttgtctggttttggtatgagggtaagaatgcattcatgaaattctttatttttgagatttattcttttttattatgtctatctttgttgaatttcttcttcatattgtgaattattttcttgatttagtaaaattgtctatctgtattttcttgtatctcactgaggttccttaagatcattattttgaattccttttctggcattttattgatttcttttttactggagtctgaaactaaagagctacattcctttggtggtgtcatattttattgctttttcatatttcttgtgtcagtgagttgatgtctttgcatccggtggaacaattacctcttctatacaaactttctggagtggttttcataaaaaaagacttccgcttgcaattagggttggtgttacagttgggaggggtgtgatgactttgtttctgaatagatgcagtgatagggtctccatgcagcttctaaagctacgttcaatgtcagcaataactgtgggcacctcagtagcttaagttgtagaaatttgtggcagtggtggtggtggcatagattattaatgtcctcagtgtcaagggcttttgaggtcctcctattcttatttttttcataatggggagatttagccaaggggactgctcttcatgtcagatatcacatgacctacaagcaagtgcagtggtgctgagttctaggtgcaggtgcttgaagtggctgtgggactagagtcttatgcccaggatcttgccaacctattgtgacacctgggtcttgggttacaggttcactctctgtgctagggttggatgtaggcttcccacagagccaggatttgtgactctgagacattactctacaaactcagtcccagctgtgagtggctcaactccaggaaagaaggagtgcagggaagtttggacccagagagcaggatatgccctgatttggcaacatgagccagtagggttcagtggcaacttggatctcaggggatgaggcaccatgtagtagtgattcttgacccctggatgttgggactcagcagtaccttagactctgtaagaccacatgcggtagcagtaccccagaatggcaacatacagctgttacttgtgccctgagtgggggcagagtacagcacagtggtggctgtatgccacagggagaggggtatcttagcagctctgacactaagcaggtagaccagctccagggaaacagcgtattagagttgttttccctttaggctggagtgtctcagatcagcccagccactgctcagttttccaaggatgtgggttatcacatcagctcagctttgggatttacagctgctcagctgagcgatggcaccaattcaccaagggacaatatgccacttcagctcaggcctgggggacatgacttttctaggcagcccaggtaccatttccctgggatgaagggtgctacttcagattaagtactggggtgcgtgaccgctctgagtggccaatgtactgttttcccaggaggcagggtactgcttcagcactggcctgaaggggagggtgaaaggtagattaagtgactctaccttcacctgggcccatggggaagagtggaacagttgctggcagctcggcttggggatgtcgggccactgggttcgggtggttcaacggtagcttagccttagtgatggagtgtcatagctatgcactcccagagcaagagacactccagccaaagctccatttccaagacggcatagcgcagtagctgcgcaggccacagagggcaggtcacactggttgctctttttcttggggaagcacggctatgtggacttcaggcaggtccctcagctgggacttggctcctgtgaggactacatgagactccatgggtgaggtctgtagctgttcaaggtgttgatggggcttgctgggatccttttgtgtaccattctaccctagagagaagttcctccctgtttccagcagatcccaagtgggtgatgggtggtaaagaccaggtgttttgtttctattctctatgtggtcattctgagtttcttgctatccagggtttctgttacttctctgatgcagtctggtacactgccttagttattattttttcttcttctgtttttagttcatctttttgtttttttctatatagcaatggggtttccctatgttgcccaggctgctctcaaactccagagctcaacagatccactcaccttggcctcccagagtgccgggactacaggcacgaaccatcgtgcctggcccagttatttttgttaaagtttagttgttgattgttgttgtggctgtctttgtgaaagagacgagagctaggggcctctggttggccatgctactgatgtcactcttaaagtacttatctttaaaagtccagtgctggagatttgtaagctacttatatttctgctcagaattcctaaagtctctcattttatttctagattatacattccattgatagagcccttataaatataacattaagaagttgagcattacctttaggccaaagcaatttacttttaaaaaatctgattaatttcaacacaatcaaccagatgtcagaagatttcagtgcctctgatagatgctgacaggtgtggaaattaaaatcagagagggaagcaattaaatcctggcaaacattactttaatgagacaaccaaatcataagctatggaataccttgtattcttgataagtatcttagggtggcatgagagtgcactttaaattgtatgtggtatttgatgactggaatgcagggcagtccatatttgtcatctaattcctttggcctgatttaacatttcagttgcttctggggacagacttctatgtttaaaacattgttttattttaataaatgttaggttaagtaatccttttactactacctctgttgccacatgaaacttatgaaaatgaccaaattattattggccttttcgcagtggttttgggataactgtgaaaagagaaacacagaatgtgtattttatgcaacttctaatcaaaagatttgataattacagcactaaaaccagaacccagttcctccatccccatttcattattcttttcaatatgattccccctattcggaatgaatatcttggacaccagggtgaaagaggtaccagtttattgacttagtgggagtttttataagatactcttatattgcttattgaggtactaaagcacttacaaaatatcaagtattttgagttagctttacactggttcaataacacttagaatttttgttcataatactaagataatcatcttagggatggttacattttgttgtgaggtgtggtggaaaattcaaaggacaccatggtttgtgaaaaacccattgcagctgatctctgcacttttcatttccatgtcattccattttcttctgctttttctttaccccctgttattttcttgcttctctctctttattatcttaccttcatttactccatcctgtttttctccaaaatatagttgcttctgtaaaattgcttctgagggtgagcatatttttgaggggagagaggatggatggtttgacaaaggatgcagacatgtcaggttctgggtcagcagttagttataaaatacacagaggcagccaaggataactggcttcattaccaaaaggctagagtgggatttgtcagttgtcccagatgtctgtatggaattatggaaaactccattgcattatgaaacactcaggagctactcaggacacatgccactcaatccacgtgaagagggctggtgaacttcttagctagaaagacttcagctttcctattgcttaaaatgagactgattggtgaaggatttgtattagtccattctcacgctgctataaagaactgccagagaccacgtaatttataaagaaagaggtttaattgactcacagttccacattgctggggaggcctcaggaaacttataatcatggtgaaaggcaaaggaggaacaggcaccttcttcacagggcggcaggaaagagtgactgccagcaggagaaatgccagatgcttataaaactatcagatctcgtgagactcactcactatcatgagaacagcatgggggaaattgcccccatgatcggattacttctacctggtatcacccttgactcatggggtttacaattcaagatgacattttcggtgtggacacagtcaaactgtatcacactcttcacaaaacttcactggtacagacttgcgtatatggcttgtgcttcgacactttgcccagggatgttgcatcttgaaactttcctggtgagatctgagaaagtgtttatggtaacactgcatcaaacactccttttgccttagcttagtaatgtgtcaccttctggttagaccacagatgtgaagtctactctttctcctttcacttgctaataaagcagaacttagaactaagtgtgtgttagtgcttcgacaattgaattttctgtgctatacactcggtttccctttcctgaagttgtttagttaccctcttcaaatagcaattgggaggctacgtcatgtagtaggagggtgcttactgattttggtatcaagatacagtgttacatttttatctgctccatgttaaccatgtgatctttgaagtttggtttttgtatttgtaaaatttgggtaataaggtctcattggagttataaagggaatggtttgagacataatggtcattgtgatttttcaagctataaaataaagcatgatgttaaaagatgattaatgttttcatttggtggtagatgacaagtttcttgcagggcatctgatcaatcatgctcttttttttttttttttttttgaaacttttattttaagttcaggggtatagttgcaggatccatgttcttttcttaacctgttttgagtcctttatgtaaacgggacattttatcaaaacttcctagaagtcttatatttctcaataaatccatccattctattaaaacaaatttgctttgttcttagagtctggtggaaactccaactctctgaacctagggcatgattatgggcacaaagttgaaaatgatgtgcgattcatcagcaggtctttcaactaaagcagtatctgttttgctttttaggggtcaaggaaacttttgattttaaaatcttaaaagtttttgggctgtctcttgttagatgaggtcatgtgagagtgacatagattaatatttcggtgttttaaaactaggaaacataagtcaaagagatattctcttgcctaatgtgcttataatgttatcttttgatcatataaatgtggatttatgggaagaaatgttatcactgctctctataaccatatatatggaataatggagagaaatcttatttaaaaagtttaactaagggcaactttggctatggagtatatatcataatcttcacatacatatgaagaaattgacactcatggagtttaaataacttgcctaaggccattgattaaaggaaatctgactggctcgaaatcctatgtacttttcccatttcctcatttcaatcaaatagctggttttattttattttctctctccaccaagccttgtgaattaagacaatgagttgctgtttgtctttgtctttccctagcctaataacctaggaaaaactgaagtagaaaggaaggattactggactagcaggcacaaactttggctccaaattcatgccctgccagatactaaactgtgtaatcttgggcaaattactttccttttgtgaacttcagtttctacttctgtaaaatgtggacaataatattcattttatatggtttctgtaaagttaatcatgaggatggtgttagttcctttctcatcctttctgtccctctttgagcttctgtttcctcacctatgaagccagtagaatcatctcttcctgcttcttcatcgggttcctgtggggtgcaatgaatgtgaaaatgttttgtaaaacaagaaaccattatgtagatataagaggttatgactattaatgaataaatatgggtttggtgtctggaagtaatttttacttatttcatttgtaaacactagcattgcagttggctgaaccttgtgtcaaccatccattccaggagccagctatctgaggtaagagaggaggcgtgtcttcttgtttatgaaatactaataggcatctgagccagtaatgttgattttagaagaaatacaaagaatagaagaaatacaaagtactttatgaggaaaagaactgaaaaatggccaagacagtgagctgacctctctttttatttttgtttttttgatttatttttttcccttttaattcatagcccttaaggtttaataccaaaaccaaaaatctgggccacacagacgattcagatttaatgtgtatgtatttaagtgtccataaaatgcaatggagtagaatgtgcttaaccattattttattgtatcctcaactagtatgtggcaggagggctttttacctggtttcctaacccttgattgagcgcatttttgactacactatactgccagtgttacctggctctgaaggggccaaatatttatggctgggtcagtcactctctcttagctgccaaacaaaatcatctcaaaaagctagaatccaaagccacaacagaaaaatcctaagaacacagaaaattgagttagtcttttgaaaccttgcatccattgtatctgaatgccactctcctgggggactgttgggaatgacaccaatccttggcagaagaatacatttgtcttgagtttgccaagaaaatggaggccaatggagaaaaaacatttaaaggaagcatcatagttgtaaaatttaccagatgcgatttttctcctaaagtcaacctgctgaatctgtaccttctaatgagctctactgtgttttatgtaatgtaacttaaccaaaaagaggtgaagtagtcaatatgtagaatagtaactttgtagaagatttgatatcattatttagagtactatacacatgtattctgctgaatattttgttaattcctttggtatgttatatctatgacctcgaactgcaaccatgacttcagttgcacagacctttgagaagaataaaattggttggtattgccccaaatttgtaggacttagaaaatttagaattgagaggaaattaaggtgtcaggtttacatgattttcaaagctaatatcatatatatataataagaacacgtgcagacaaggtaggttatgtatggactatgaaatttctgtaattaaaccagacataacagccacttaagttatttagattttcttctcattcctacaaaaaaagaacattgtttttatttttattattatttatttatttttcaagtggaatataagctagtttacccaggaagttttttatttatttatttacttattattttactttaagttcttggatacatgtgcagaacatgcaggatttttacgtaggtatacatgtgccatggtggttgctgcaccctatccacccatcatccaggttttaagcaccgcatgcattaggtatttgtccttgccttgccctccacccatcaacgggccccgatgtgtgatgttcccctccctgtgtccatgtgttctcgttcaactcccacttctgagtgagaacatgcggtgtttggaagccatcattctcagcaaactaacacagaaaaagagaacattgtttttaaaaaaggtagtagcaaaaaatgtaagaatggctcctgtccaccttttatttcttttctagtccacaaaataaccctgcaaaaacttatttctaatgttttatttttacggataaatatatcagaaaagaatgtactgtagatacctactatcatagtttttgacagctctgtgaggcagagatctaacttgttcatttagaaactgcagttatcacactaaccttccctccgatgccaattgttaaatattaatagaataagctttgaaaagtaattaactgtatcccctgtccccacagaaacccatcttgaaactatcaagaggagttttaagcaagccctgaaaggttacaaaaattactctcaagaaagaggaattttctctctttctcttttcgttatattttggaggtggggaatggtagagagggaatgatagaaacctctcaagtaacctttgggaggtggagaagtaaatagtctgggagcatgctgtagaaatttaaaataatcctgtggcaataattggtatcagtggcagtaatgaagaaagaataacagtttcaataaataattagacttgacagtaaatgtgtcaacaggtacccacttaatgagtgtaatcattgtttttctctgctctcaacgttgatccactgactgcggtgtgttctctgtcccatttccaaaccaaatctatttaaagctgcactccacggaatctgcaacagtataccctgtttactatttagagctgatacctaatgttctttaataggcaagatctgtacttgaacgagaacaggcttctggcctcttgtagacggttgattatccctgttttccacagggtgattcattagcaaggatgaataatacccaattaaatctcatggacttgtctatattgccagagtgaattgtttattataatttggtggaaacagtcctagtctgctttaaataaaattaatcagttaccgttttttgaagtggaggtagaggcagtagttataagtgaaattacctctgtaataacctgaatagaatcacattgtttttgggagcaaagcagtatgttgtatgttatgtgcaccagaagccatgagaatccttttctaatcccagctgtaatgtcacctggctgtgtcacctaggcaagtcaccttccctctatgaggtctgtttcatcatctaatgacaaagttggaccagttgatcatggcattacttccggttaaatgttctcttatatatgattttatttcctagctagtcccttctctctcctggtgccatgtttccaaaatcataggacagtcctatgactctactgcacagccactgtggaaaattagttatttttctgcttagcttttgcttcttttacataccagacatgcagttaatgacttttattatatatactgtaagaatgggcatttatacaccggtagcggtagtcccttaccccagcaacttgcaattccttgttaggaaagaaaagctgttttcctccacatttctttactctgtgacattgttccctgatctgggtcttatgagaggatctggtaaacttcccccctattaagaccgttaggaagaggtggatgcttcttccattatttgatttttccagagcaaatcactggatctgtaaaggagatcagaatgtcaaagccagaggggacttcacgaagtaatctaaacaaattatttcatgtcacagatggagattttagtgtctgggagggaatctgatttgtctaaagtgtttttgactgatcttggactagaattcttctgactacatagttgtatctttaagtagagaaatctttttctataaactatcctttcacttcctagttcttaaaaggccattatcttccaggcaaaaccaatttcattttcagcatggggatgtgagatgtccttaaacataaatggactccaggtatcttcattaatttcatgaagacatggcacagagggttccggctaccttctgctttccgtgtttattaaaagactgtggattcccttgcagttcttcctgtaagaggttgtttgacgctgacatcatcactctcctccacccgcctcctgcccttttctgaatcagtgaattataggaatctgagaatgagctcctgtttcctgcacattgttggggaacattaaaaaaaagaagacagatgagggatttataagcaagaggacagaagaataatagccaacacaatgaagtctagttcaaggcctgcgattcccaattgctgggctacacagcattaatagcagtgtctctcaccctttcagacccttctctcttatttcagacccttctgccttattcttgtggggatgggctgggactgagaaacagctagtataatcattgccaaaatgaaactcacatgtacatgggggcttccaggtctggagaagagtgtagtaattgttacccatccgatagaaggtgcttagagaccactggacctaagcacttacctggaacctcacagtacagaggttcaaagagtagaaatcagttgactgagtctgaggttcaaatcctggctctaattaatttgctatgagtttagtgaatgcctaactttcctctgagctgcactttctccatctgtgagatgggaggaggagggtggcatagatgatgtcaaaggaaccctctgattttcatgagtctcagatttgcccaaggacctgcagcgaatgtgcagccaagccagatcttgaattcagagcccctttttctggtttgagatggtcatcattataagttccactacccatactttccaaacagtatgtttgcagctttcagccttgttttattaaatctactttttctcttttatttgacagtccctttctgtccagggacctgcctaaagtagcaaatcttttttttttttttttttttttttttgagacggagtctcgctctgtcacccaggctggagtgcagtggcacgatcttggtttactgcagcctccgcctcccaggttcaagcaattctcctgtctcagcctcccaagtagctgggactacaggtgcacacccccacgcccagctaatttttttttttttttttaagtagagatggggtttcaccatgttggtcaggctgctctcaaactcctgacctcaggagtccacccgcctcggcctaccaaagtgctgggattacaggtgtgagccaccgtgcctggcctaaagtagtagttcttaatatacgtgtgtgtatgtgcgtgcacacgtgcatacacatgatcctgtgtttggggcagatgtgaggattatggaattttcagaaactcagatgaatttatgaaatagttggaaaatgcagaactccagaaaatgctatcaacaagtttaggaggtttgtagatgctctgaaggccatccatgagttaagcaaaagttttcattctatgtgggaagtatgagatgacatttgagtggcatacatttccttttgctgttggattttccccgtagtcacctattgttatactctgagtgttaggctcgttttgtagcatgacttttggcatgtatgtatctcaaactattgagtgatattttaatattgaaactcttattctacttcattcattcactcatgcattcaaattcaattttaattcagaatttgctaaatgctagacatctcaatacattattgtatataatcctataaaatagaaaattgctaggtgctcagagaggttgagtaatttgcccaaagttttacagctaataaatataaaatctggatttaaatccggatttactccaaaatatgtgaatacctccagagataacattgaagacaaatagagacaatgatgcaagttcataaaccatggaaatttctggtagaaaatggtagatgggccccagaggaatacagagaatgtgtactatgggattttaggaagggacaagatcatacattatgaattacttcatatcataattcgttaactacgtgtttatctggctccttaagaaagaataaaaaaagctagataatcatatgaaacacattatgcataactcagtttttttcttgttcttcaaacttctgtcaggttagtgctctcaatatcttcatttggtaagtgagatgaggagatgaagagtagttagggtcatagtgccctgatcatactgagttttcacctaaataggaatttcagtgctttgggtcatctattttgttcccctcctcccggcctacccccccattatattgagcttgagacttttaacagagataacttctgaccacgcacagatcagcacaaatgcagatgtgagcagctagaatttggatgctgccaaattgtgatgactgccacatgtgtgaagctaaagcttagcacctgatgacccactgtgagtgtgtgggggggccagaagagtgaaaggcaggtcagagatggaagacgcctcggagtttctcaatggcagtaccttcaccttgcagatgcagaaatggaggtggttagaaggggtaagacttactaaaattcacacagcaggttaatggctctctgagaataatggcaaaacaagaacaaggctttataccagcaatctacagtagtatctacttttatttcctacctttccgttggcatatactcacactgataggcttgacaggcagataaacctgtatttgaaggtcagcaggattagttgtgtggccttggataagttacttgatttacttgggtctcaggtttgttgtctgtaatagaaaccataccctttttcttttctttctttcttttttttttgagatggagttttgctcttattgctcaggctggagtgcaccggcatgaccttggctcactgcaacctctgcctcctgggttcaagcgattctcctgcttcagcctctgtagtagctgggattacaggcatgagccaccacgcccagctaattttttgtatttttagtagagacaaggtttcaccatgttggccaggctggtctcaaactcctgacctcaggtgatccacctgcctcagcctcccaaattgctgggattacaggcatgagccaccgtgcgtggctgaaaccatacccttttaacaggactataccagtgtactgttcaatatacagaaatactatcacccatctgattaataatccttatcacagcccaatgagacaggcacagatgttctgcttttcaagattctatttcctaacttcatcttgacagttgtaagtctcttgcttctcaaagtttggtctgaggaccggaagcatcagcattacatgggagcttgttagaaatgcaaatctcagatcatactctagaacttctgaatgagaatctctactttaacaagagccccaggtagttcatatgctcattagtgtttgagaaacattcacttcggccctcgccctatttcaaggctattgctgtggtgtgctgacaatgcctggcatgctgccagcattcttggggcatgctgtaccatgccttgagatagcggggtccggggggcggggatgctgtgaagtcactccttgggaataatggaagactgggttgaagggatccagcaggctttatctttttaacacccttcatttccttagaagttactattcagaaggggtcaaactgggattggattctaagtctttctgatccaaagtccatgttcttttcattaaaccacgatgtctcagtcaagaggaatgctgggttgtgggtgataactgttcattccctgtagtgtgaatatttccacactggctgctttaccctattactcaattcctagaggggaagaatttttttaaaaaaatttaaaaagcctgagttgaaagccaggatcctgcagcttaatcagttatttttgctttttaatgagggtgactattgtgaaataagtaattattaattactcaaaactaatgaaatattttagtttccttgctcaaaaagcatatggatgctaaaagaaagcatatgggtgctttctgggaagcatattggtgaatggacaaattacagtggtgccaatatgcctttgctgtctggctggggccatcaaaacgtgtgctggcatctgagtcctcgtgtgtttaaagggattttttaaaattcccatttgataagtgcctggggttgcctctggagttacacagcgctgtctcatcaatctttctgccatgctttcactcagacattactggctgagtataaactcggtataaacctttgctgtaagtagcttctgtggctctttctttccagatgcctcctatcctctgcaataggttcagtgggcctgccccatggatggcacgtatggagactttgtctatacaacattttaccacagtggtaaaagcagtagccgaaaaggtggcagcactgagacctgtttgctccatcagggactctgtctgaggccctcggccagctgttgaattgctgcactgcaaatttcttacttgtaaaactggaatgataataccagtgctcctgagctcacaagcatgctgttcatccaatttgcagtccatgccctttgctcttcctctcctttccttcatgcctcttctcctttgctgcacgttcagctggtctagtaaaaagcttgatggatttggaggtggctgaaaccattttgcttgctctggggattgcacacttctgagcttgtcagaggcaggcaacatggcatgttttagaagatacttggctgagtgtccacgaactgtggctctcagaccaacgtgacttagtaatcatttactcaacacctacaagcaaggtagcttgctaagaaattgaaggagggagctggcgggtctgtggaggtgagtttgattcagggccagtcaagacttggtgtgatgtgtgagctcagtaattatactttgagagagacagaatttggagaactctttcctattggaggtttcttatagaactagggacaagagctggctttgaaagattattaattggactttgataagatattacaaggatttgaagagtaagtctctgtcaggcaaaaaccagcttgcagtgggactcggaagcaggcaaatatcaggcatggctgaagaactgggcatcaatcacagacatgtgtagctgagagaaatcacttccttttggtgaaccctagactctatctgcaaaatatgagctttgaacaagatagttctcaggaagcctcaagaactctagctgaaattctacaaagtctcttatcacacagccaggttatccacttagcaaaatcctggcactagaatagcagcaatggagcaaggcctgggacccaggtgtcctgcctctattttatattcttcttactgtccacagagcattatgatgaagataggtggggtggacattattattctagtttttaatgtatgaaacataggatgttaagggaatctaagacataaaacgaataagagatttaactatcccagatattgatcacccttccaccacagagggccagctcttataaaatacaccccttgccattttgcctgtgtgggccttgctttcctgcctgaggaaccagcacgtaccccttctcccacgaaagtcatccctgtctgctctttggctctggaattcagtcttagcaatggactttgttttataattaaactttattttgtattgccatctttccatgtttccacccccatctcatccctcatacatattttaaaggctttgaatttaaggattactttctgcttctctgagttccctgtagctcctggcacagggccccagacatagtgctcagtagagaagcaaatgactatgttctgcaatagtttttctctctgcctattgcttgtttctgagatggatatgagacttataggcttaaagaatttcggaactggaaaggaagttaaaacctatctagtccagctcccccaccccagggaagaaatgacttacttaaatttgcctgcatagttagtggcagttctgcaaatcgtgcccacatctcaccaagcattggagagatggttggcacttgagtctcttcttaggactctacaggctctgtctggagtccttgtttctatgaagaccactaagaataaaggtaatacaggtgctgctgctgctgtattaaacagatggaaagaagtagacattcattgtatgtctgttatgtgacaggccttgtgacaggtgttttcacatagtttagcttggtcagtcatcaaaagctagaattcccattcctccatgagggagacagattgtttctaaataggacatttagcagaagctctttcctgtaagctctgaaaggcactcggtagtggatagatgcttccctcctagaacacgggtgtagggctctgcagagtagcatgcatggctcttctaagggatatggattgtagagactgtgaaaataagcagaagttgtgatcaaaattggcgttgggggacttgtggtcacccgagtgtaccagaagactgagctcttctactctcctttccacacatacatctgagtctttggagagctgcaacctgagtgcctcgttcttgagtgtctgtagcattggcttttacttgcacttactacattttactcctgcctcttccctagctagcctcgacctcaacgtgtattatttcctccccccttgtcatttttcttctattacttttgcttcttccccttcctccttctcctgacttaaccttgggtggccgcaggtcttaaggctctgtgatggcagagtcttctgtattggactgtgaagattctggcagggaagacaatacacaaatctgttaaatacacaataaaaatagcttatgatctatgggacttggtattaagcaagatgatattaacgaggtttgattgctgttctgaaatgtggcagctgcgcacacgtattggctgctttttctccccacctttggcagcttgtgagcggtgttgccatgacactccttgggctctgtttagatcagctattttctgaaggagtcgctgaccttccccacaatagaagctgttgatgtggtcacgtcagtgcctcttcgggagctgtgtgactggcgagccctcagttgccacttggaaacggttggaaactgtagatcaggcacagacattgaatgtttaggagcaagaagggcttgtgaatatcccgtactctcatttgatgtgtgaggacagtgaggcgcattatgcggaggtgacttgctcaaggccacagagtgcatagagagaaggctgggagaggaggtcaggtcttgtttccctgcttgttgatgttccagctgcatgcacggcactgagccctgcctgagtgcgcacttcagtcctgaaagctgcagagggatgggctggtgacactgccgtgcctaggagtgggcagagaaggtgaagacacggagagtaactcagtgcagaggcagcgacgggaaagtgaaggagagtaagaagcccagagtaaatggccaaggtgccactaacatgtccatccacagaaacttttctgggggagaatgtttcttatcagattccgcagatgggttccttgagaagtgagtgcttaaaggggctgggatagataatcataatgccatgttctcactgctctgaacccttttctgacctcacgtaagacctcacctaaaacttccacaagagccgttcattgtcagtaccatgctttttttggagtactgtataatgtcaagtatttttccaatagtttatatgtgaaatgtggtctccgccacaagattacagggtcctcgggagcagaaattgtgacttaaatgggcctttctcccttccactttttattcttgccctaccttttaatcaggcacctggaagagatctaaacacaggatgagcatccagtaagtttttgttgagttgaacttagttggattcggatgacctctaaaaaatgtttactaattgctggtgaaaattggcaaatgattattttgtggaaaaatgttctcaccgaattagattttgttaagaattcttatgtgtgattatttttcataaacccaatacactgtctattattatccttattttacaatgaagaaaaaaaattcaattgactgctcaaatttacctctaggaacaggtgatggagatttgatttgcatttagatcttttgtctccaaatattgtaatgttacttctgctttcccccactacataccgaagaggtcttacttcattgacagtggttcagccttctgctgaggagtcttcagtctttttatgttgtaatctgcctccttatgagtttgggaaaagaattatggggcctcaggtttaaatgctgttatgctttgggtaacactttagctgatttgttttcagtaaagccagaaggaaaatactgcatttctgtcttctttaatttccttaatttgaaataagccttgaactagtttgtaagactcctttaacttttaacaaatttaggcacatatgtaatataaagaaaaaggcactctgccctaaatgaattgactaattaagctgagaacaaaactagaccacttttttttttttggtttcaaaaaaaggatgcaggaatttttaaatgctacagctaaaacccagattttgtctgatattgatgttctgtaggttttctcaatatttgccatattcattagatgacattcattatactttcctaacttttataggatttagatgaggtttgttgataacattctatattctttctgaaaagaaaaacacacacacacaaatgtcgagcagtcttctttttttaatgtatattctcaggaaaaacaccattgactaatttaaatttcagtacggaggcaaagctgatctgtagtgaatgtaacatcttgttaaatacaggtttcatgcttcttttttgtacctttccaggcttttaaggaggagaataatttgaataataatggcataatgtccagagggaaagttgaatacgtaagacagagatgcatgtgggcctatttctgtactttgtgtgcgtgtctctgtgtggtggctttatggtttttaaaataaagttttctgtattttcaatgtatataataactttggaatcaccaaagaaaagttgatattgagacttgggtttttagtggggaggaatggatgttttttttcttttacagttttaggcaaagtgaaactttagaaaattatattatttgaagttagatggaaaccaaacactatctttatagtttctttcagaagaaactttgtcttaggaatctgggcactcttgtaaactttctaaatttcttcagccctcattgatacccacactttgcttaattcagttgaatcagtttacagtgaataacgtccctgggaacattaatcaatgaacacacacacgcgcgtgcgcgcacacacacacacagacacacacacacagggaggacaaaaaggaaataaaagcatcactttgtaccttcctcaattcaaacctgtctgctttcttcagaatttcggatgtatgtgtctgtttcttccagtagattgggagcaccctgaagacagaagagacatatgtatatatatatatttttgtttgttttttcttttttgtttttagacagagtctcgctctgtcactaggctagagtgcagtggcgtgatctcagctcactgcaatctccacctcctgggttcaagcgattctcctgcctcagcctcccgagtagctgggactacaggcgcccgccaccacacctggctaatttttgtatttttagtagagacagggtttcaccatattggccatgctggtctcgaactcctgaccttgtgttctacccgcctcggcctcccaaagtgctgggattacaggcgtgagccaccgcgcctggctagaaagaagagacattttatgtatgatcgtcataatgattttgtgaactcaggtgtagtaaggtaaaacgccctggtaaaatcacttactgggacttttcagaatctgtttagaagtcattccattactcttgaaatccctctgctttatagactttctgagaaataaggaaagtccatctgcctacttgtcatagaaatgggtacttcagcagtaaaatagcctgtttacatactggctcaaactgtcaatgtaggaaaaggtttcgtgtattataaaatgttacagagctagaaaaaatatatacaagtaatatatagagtgcatatatatgtacatatatatgatctgttccttgtcacaatatttaacccaaagtgctatttacagtaatgaatcaaaatgtcagtcttaaaaatatgaagtgtcaaagtgttcccacgttgtagaaaagtttgatgtgacagtttgttaatcatatgactattctatcaatgtgtctcataatgtcttttgctcaacactctcgtaggctcctcacacttttttcatgaattcctagcttaagttactaacccaaggagcacatttgagttgcgtgtctcccacacctcacacaaaggcggctatgttttgctgtacttaaaactgaatggatttcacattattttagagtggtttgattttgtgcctgacgcatttatggatagtagcttaaaaaatttctgtaattttgctgttttcactacagaatcatcaaatgaaactttaacttatagcgcggatgttttttgtttctccaaagtttcccaagatatcagatgtccttatttgctagtgcccattcgttgaacttggacacatttttgaatttttctcagcacattgatgatcccaacttctttttcctactaaaagggcagagtcttagaacataaatattatatatgtggaaaagggcaacatagtttctttcgggaggatttttggccatgctactcactagttcgtggatcacacttaatctctgtgcctccgtgtcttctggagaaaatttaagggtgaaattagattagatcagtgaatttttaaacttatgctctagaagccctaggattctgggtagaaatgaagctccaatgattgagtgtggggtgggcagtggggactctgggcccttcaaaccaagcagctctgctattcgcttgttaaaatttagagttttataaactgtttcacttaaagaaaggttctactgcttaacctgcctacctgttggcatcactgtcttaagtgatctagagtcagtggcttatttcccacaaggattcagtgggcaactgtggcaatagttcttggctaacctggtcactatggaagttctttccgtggaaaaagattctccatccttcaatttgagataagatttactaattgagacctcatttgtttctgattttaatctttgcatcattttagttttaataaactaactttccaacttaccagattttcgggttgacaaagaccattatttagagaaacacaggcaaaggaaagtctaaaagctttggctggaatttcaactgcttctggtcaagaatatgaattttactttgtacggccaaagcgtttcaaccattctggggaggtgggtgaatgcccacaacttgaacttttcattccattgctttccatcctcaagtctctcccttcttctccatacacatgcaactaccaccaccaccatggttctcttcgcatggcctatgtatgtccccagacatggtggagcagaaaagtaaaaagttgtgatttacaaaccaaggtagagactataagaagaacaaaaatgattaaggggcatgagttagtgacactaacaaaaagccttcatgtatcaacataaaaaaatcaaattgaagaaaatatttttcatggacagaaaacctaccctaaagacaggaaagaaggtgaacggctatttcactagatgctgaaacatcatctccaaagttcctcaggaatcaaactatgggattagattcaactcttttaatagctgaaatctagaagggagagagtggttacgtctatagttttatgaatgatgctgaactctttctcacaataaaatgctcttctactaacaaatttaaagacttgagcacccagaaacagcagttgcatgccaagtcaggaatattctttttttaagtcacatgtcagccactggggatgcacccgggtttaggctggaggttggagagggttcatccaaaatccatgcacaagatatttatccaaaattctggagtggttccttgttcattctctgaagaaattggtgagataaggcaagcatcctaaacaaatgttgagctctaaaaatacagtttaaataaaacagaaagcattctgagtatagttttggccaaaatagaatagtataataaatcatttggctggagggtatgacatgagaataaacaaaaaaacagcatgtttgctatcttttctgtttattttacttatgcatcaacccccttctgcctccttttactccttgctagagtgtggaaggatcttgaattcagggccttgtctgtcttgtttttcagctggctggagtcacacttggcttatttatgagctcaataaacattatgaatggatgagcaattttgaaagattgacatattgaaggaaaaaaatgacgtgaatctgaaaaattctgacatggccacttctaaactctctgggacttgtactaaatgcttatagatttaggtagcattctgagcattacctcacttattcctttcaaccagcctctgaggaaggtactgttattatcaccatttcacagaggaagaattgagatccagagatgttacataatttgcccaaggttacataataataatataatagctaaagccaggatatgaactcaggtagtctggcttcagcagcttctctcttaactacgaagctatattgtttccacatggtgattataattataactgcctgttctactttcctgtacgttgtgaggctgagtttaggtgtgaaaggattagggaagaagtatatcaactagtgaaggcgagacaacacacaaacaactataacttaaagtagatagaaacttgcagagaaagttcagagaagaaaaaagaactattatttccaccagggtgaagggcaggagtcaaagaaggcttcctgtgggaagtgacttagtttggccttgaatgagtagaattatagtaaagggagatgctttccaagtaaacagaataaacagtggaagagatgccagtctaatgctgttgagtttagcagattctttccgaaagagtgtgcgctgagaagtggggagtggagagggtttgtggtggaaggaggtggaagccctgagaagggatctgagtgggaagatgcaagcgttccaaaagcatattcgcaatctctctggaggtcaatcctgggcaaaatgttgcttttgtcatgctttaactcattattttttgatgcattgtccgcaaagactagtccaaggaggtaccactccagaaagagtggccacacgagtctggaaaatgctgcaccctctggtgctctattaggtgctgacagtgcgtgttaacatgcccagtcttcgaggaagtcccgtgagacagcaatcaccttgctttctttgactgtagacctggtttgttgttttactttgagcaaacccctgttaacatccctcagaagacacacttcaggagccctcttccagccaaccagctggactaatttgtgtaaactttccaacaagttgtgtgcttctgctgaacacaggtcatctcagagtaaaacttgctccattctcaggacagccaacagtccccttttgaaagaagttagagcacgtttgcctatagaaattgttatgtgtcagttagaaagcaagctgcatccgaggtaacaaacttgaggagctgcagcccctctgacgaagtaaaagtgagaagcaggaagtgaaggagtctcagctcttgaaataaaatgtgcatacgggtgagagttgccaaccacaagaactctagctggctgccctgagaacatattaggagaaaacatggttaaagtcggcacctgacctattagctgcaggggcagctcattatcttttttattctttcaccctgcattggcccgaaaggggaagagaggcagtaagtggactgtaaagagtgcttattccacgctgggcaggtcattagaattgtcatgtcaaattcccttccttaatcccctcaactacccagtggagtcaggattattaatctcttcctctatacgtgaggacagtgaatccagagtggcttgctggtgctgaatagatcatgttgtcttacaacttgagcttttcccttgttcctttccctatttgtctgctgaactcatctgtctccaggttgtaaatgagattctcctctgaagagcctctgagccccctgtaactctattcttgtattgcatgacgatactcttgttctttaggtttatacctctttctccccttaagacctaaaactcgatctgggttactctagagcccacaggtttatattgcactgctctgcccacattccagccttctccactttaacatatgacttgatgatagcttttcagacccagtccctcacaagatacctctttttcaacccattattttagaccttctttacttgacatattttgagttttctggattctaggcttccttatcgttagtgtcactttccccccttctgttacatgtctgttaccttcttgctatttgcttaggtcctaccttaactttgaaggaacgcttttcaaacccggcctgcatcggaattaggaatcccaccctcagaagttatggtttagtaaacctgagagagtgtgggagaatttgtattgcactcccagatgatcctgaaactgtcattctgtgggcttatgtttattagcacttctttaaagcatagttcaagacctctgttttccaggatatttaactatcttagtccaaagtctttcctttcttccttgcctccttctctctctcctctttgtcttttcttcttctcttcctcccttctttctcccaccctcctctctctttcttctcatgaagtccatatgatatcctgtctgaattacataactttttttttctttttgtggagatggggtctcactatgctgcccaggctggtcttgaattcctaggctcaagcgatcctcccattgaagccttccaaagtgctgggattacagtcatgagccaccacatctggcctgaattagacaacttcttatttatgtggatctcagaagctccatcatccacttcttaagcctggtaaacacttttattagataagagagacagttttgcataaatgaacaaaaatctagatgaaaagttctcgaatcctgaatcacatcttgccataacctcttactagccgtgtgttcttggacatcttatggactggagtttccttgtctctaaaataattattccatttccttgtactgcagaagctcatgaaaaaggtcaaatgagatagcgggtgtataaagtgctacacaaatgcaatgatgctaatagtaaattattgttgatgttttctttgtttctgtacagttgactcatttgctttatcattaatgatgaggcatgaaagaaatgctgcttgtttttaatgaactatggaagactaggtggagctgacgggatgttgggatttcaggaaagctcttttaggtttctggaaatgatactcataccaatagttgtgagcttaggttgaagagcaatgttgtatttatactataatttttcttcaaataaactgtgataaagattttgaatattactttcatattctgaacttctcatgtacacttgaaaagagtcatgaaatagtagtagcggttgccatttataggggtcgtagggtgttgttatggttaaatttataaatccttaaaattatgatttctatcacaaaaatgcctaaaagggtgcattctctaggttttttccttctttcattcccttccttccctcccctccctccctccttcccctccctcccttccttccttccctctcctttcctttcttctcctttccttttccttttccctctcctctcctctcctctcctctcctctcctcccctctcctctcctctcctctcctctcctttcatttttcctttcctttctctcgctctgttgctcaggctacagtgcagtggcacaatctcggctcactgcaacctccacctcccgggtccaagcgattctcatgcctcagcctcccaagtagctgggattacaggcgccctgccaccacaccaggataatttttgtatttttagtagagatggggttttgccatgttggccaggctggtctcgaactcctgacctcaaatgatttgcccattttggcttcccaaagtgttgggattacgggcgtgagccactgtgcctagcccctctaggttttcttaagaaaacctatctattcctcaagtgcttactctgcaaagcctaggtctgccaccaaggaataaaaatatggctaaatgtacttcctttcctcccagagttcactgttcaataggggacacaaacacataaataactagctcttgcaccaagcgaaatgtacagtgcgacaaaggagaggtacagatagtaggctgtgggcccgaaggagggtttccgtgggcgtgagtatgaaggaggggtttcctgaaggagggggtatttgaacaacccttttgaagactaaaaggatgtccgcaaatgaaatttagggtagaaacatgccagaaaaaggcacagtgttttcaatacgctaggcatttcttaaactatttatagctgaggttatgggaaaagagatagtagaaatatgagaatatcttctccaaagattctatgctaatatcctgatccatctgactatgcttatttgactgctttttgtgtttgtcttcttctttactggatatcctttttgccgcttcctttctggaattttctttcctggccattagcctctctctcctacaccgttgccttactctcactgccatactcctttggacatcctccttctcttgtttcctgatacttttacatccccttccatcctttactccttagcttttgtttttatttgcagtgttaaagatagcctctttttatttccctgtagtgattagatcgacgtgtttacaatatgaacacacacgttttctcttcttcaggctctgagtcatcgagttcacaatgccatgtctagtcagtacttctatgtgtgtatagtgcccattgtggccgagtagagataaggtcactgcggaagaaaataaatcgctaaaatctgttagaatacgtcagcttccaggtttgtctgaggatgcagtggaaaccacgttctgtggccagcatgtcagtagcttttgatgatcagagccttccattttgatactttaaaataatgtaatctaagttcacatcaactgaatccagacagtttcaccatccaccacattattaattccagatgggaaaattcattagggctcaaattttgtttgagacccaactgttttttaaattattattacaattattatctatttattttatttattttttttttttacaactgatgggaagggaaatttaacagctgtgtgattagcagggcatgaaattaaaaacgttttgcacagaatcaagaggttgtttactacagaatttgtcatctgagaattaagtgtcattaagactgcccacaggatgatctctttcaccattcaagctttgatttccacgcccggttttttgctaaaaggcctttaaccttttctggaaggaaaatgcatgtggatttatcacgaaggtaccatcagcatttcaaatgctaagtcaaggtaaaaacgacactcttgtctgtcacaaaataacagtacaactagatgttcagcctcactgctctcagcaaagagtgagttccaatttgaggaaatcaggtaaattagaaaaggctgcagctggattagtggcttcactctttccctctaaaactgtaggagtttcatatttccatcaaggcagctcaggtccctagagcatgatgtttacccttacattttcctaggtgtatgggctctttacgtctttggtctctttgcaaacgccctccttcgactgagctctagaaagtactctgtcctgggctgagcgcagtggctcaagcctgtaatcccagcactttgggaggccaaggcgggcagatcacgaggtcaggagttcaagaccagcctggccaacatggtgaaaccccgtctctactaaaaatacaaaaattagccaggcatgatggcgggctcctgtaatcccaactactagggaggctgaggcagaagaatcccttgatcctgggaggtagaggttgcagtgagttgagatggtgccactgcactccagcctggacgaaagagtgaaaactccctcccaaaaaaaaaaaaaaaaaaaaaaatactatgtacttgttcctttgggcaagatgttggcagttttctgcagaagcgtggtcaagcacattagctggactgtcttggtcgaggtttgaaggcaatgccatttgcttgggcaagttacatggactctctgcagttcatttgcctcatcatcctccaacttaatgaaggtaatgacagtatctacctcaaggattactttggggattcagagttattaccaaaaatgtttaaggccctgcccgactcattgtttatgctcagttaatgttagctatctccatgcttttcagtcaatatattgcattgtgtttggaagtcttcatatctagtttcatacctgacacagacttgcttaacttctgccctggaatctttttgctatccctgtcttactgtctttaatagagcctttcttatttgatacttatttatatacttgccttcgttcgttttttagacaaattttattttcatatttgttgaattaaaccagacacagcttctacacttatggggtttcctttctgggagaatggggctggtgacaattaatgcagaaaacttctattggagatagacatgcaaaaacactcagagatagagttgaggaatttgtagtcattagaggagagagatgttagttttggctgggattggagttaaatggagagaaaataaaggaagactttctggaggaggagggttttgatctggaacctgcacgctcattagaatttgaattcgacctggcagaaaggggaaaagacttcccaggctgagtgaagttttggagctgcacattttattttatttttcatatttgtttcctgctgccctctggccaccattcagaccgtttggaggcctgttattgtaggtgggacctaagttccagcaccagtagatgtgtgagtgaggcttttatagtattgatgtcttgtatttaaaatgaacagaggaagaagccctggagtccattctaataaatgtatttcaaagggggctttcttcttttgtctgagtgagaggcaggaataggaatgacagaggcagcaagtgttggatgtctgtagaagaatcatagagttctctttagagcactaaacagagggctaataaagggctattgagtcctccttatgtttttttcctctctcagatgagttttaagggtaatagaagcgcttttttttttttttctggtgacctcttaatcttacttttctctctttatctcttccttttcctagaagctaatattaaaaccactcttgtcctctgccattaaaaataaatctgggtaggtttcagcaagagagtatttcctagaatgcattatattctgggcagtagaagtgtatgtttaaatacttttcctgtagaaggtcattatgacaacagaggatgccaccagcaaccctgcagtatgtggtgaatgtgtttccacgctgtgtctgtctcgcctctgctctctgccatgtcaagctgattttaagtttaccgtcacttttagtatgtgacttgatgaggcaccataatgtgtgtgttgctggccaaacattacatgtcatgactgtagaatcatgagactggagttttagcctagaccttagaacacgtacctgcaagaggtagttattcgagcagcagtctttgtgagactggaattcaggcacagggaacacttgttcctaagttgctgccccgttgctcaaaacatcttggtaatgtctttctttctttcttttcttcttctttttttttttttttactctgttgaatgttatcttttattttgtttttattaaaaaatcaatttccagctttatcaggatataattgacgaaacaaaagttatgtatagttaaggtatacaacatattttgaggtacattgcattgtgaaatgattaccctagtcaagctaattaacataggcatcacctcacagttacctttctgtgtatgtggtgagaacgtttaagatttactctattagcaaatttcaagtgtacaatacagtattaactacagccaccgcactgtgtattaaatctccagaattattcatttggtatcactggatctccctttgaccaagaaccaagatctcctcattcccctggtcccggtagccatcattttgctctgcttctatgtgtttgacttttttaatttgcacatatcagtgaggtcacgcagtgtttgtttttctgtgcctggcttagttccttaagcaacatttcctccagattcatccatcttctcgtaaatgacaggatttccttctttgttaaggctgaataacattccacgtggtaatacaccgcattttctttattcactcttcaaatgatggacatttagatcgattccacatcctggctattgtgaataacgcagcagtgaacatgggagtgcaggtgtctccttgagacactgattttgccttagaggggattctggggctgggctccgtggtgaagggcactctctttccctcacctggaggttatgtcagcggtgtgctgggggttgtacaggtcatgttaagctgtccttcctgccttcctcaatgcgtcatttcttatttctatgttccacccaggtgctgcactctcgcctgaattccttaacgtgtgtgaggtattttggtgtgtggctagttgtttagaagtttctgagagggaatgagtgctggaaactctattttgtcatttgccaatgtaaccccacattggaattgtcttcagagataatgaagagccactgctaaaatcacagactcatgagatgtgaaagcggggaatctgtttagctcacatgcgtgtgagaaagctgagaccctgagacaaatattggcctgtgctgcaggctttcagttagacagggacagcatcagttctcattcccttgttagctctatgcctgatgtcttctcactgttttgctgcattataaagaattgattttttttttttttgagacagagtctcgctctgtcgcccaggctggagtgcagtggtgcgatctcgcctcactgcaagctccgcctcctgggttcaagtcattctcctgcctcagcctcccgaataggtgggactacaggcacccgccaccatgcccggctaattttttgtatttttagtagagacggggtttcaccatgttagccaggatggtctcgatctcctgacctcatgatccacccaccttggcctcccaaagtgctgggattacaggcgtgagccactgcacctggccagaaagttgattcttagttaagcctatgaatagttagaaaaaaaaaagagaagagagaaagttccccttagcatggcctattatcacagggtatgtttgtagcagagggagaacccagtccttatagagtgggttatggcttcttctacattccaagaaaatctcaagaagtagaaatcactctgagtgtcaaatattttagttgcctattgtcacatctattataaaatagatctggtatagataaaaatagagttaaacatactagttaatagatatatctggtgtggataaaaatagaatttagcatactagttaatatataaatatgatgtcgataaaaatagagttaaatgtacaagttcctaattggattgtagaacttaacattcaggagtaaggatgctgtcaagtctaaagctatgcccttatcctagtcagttgttatattcatggcagccttttctaaaatgtgctccatgaaatactagattcataaatggtcaaatcactgtgggactcttgctattatttccacccattgtggagattcttgatgcatccccaacaagtttaactctgagaagtcgaacaggcaaaagcaataagcacaactttcttttctcttatgttagattcaggttttgtccaatttattttataatggaaccattttgtggatgatttcccagacttgtgttctgtggaacattctttggatagcatgactttattgttaaaattcttaaggttcacatctgtcatcttataataatcttgtgtgaaatataaagtcatttgggctaaactgtagacctccatctgccctcccttccccacaggagaaattacaggtttatttaaggatcaaacagttttgaaatgaaatgttgttaggagggggaaataaaaacctttcagagcttaataattgtagaaagaagacagtgttataccggccaaaccaattttgtgaattagcactttaactcagagagttgttcctgaaaatagcttgtttttaagcaaaactttgttggcttctggtggtacactttttcaccatcaaaggcacaaatatgggtgattttaaactgtggcatactttttttgcattcaaaaccagggcttgtggaagaaacaacacccttttttaacttttcagaaacagttggcttgaccatcatggctttttttttttcccctatgtctttaggatattagcttttcgttaagctggaagggtcctcagagatcttgtccaagcccacccttgacagatgaagaaatagagggccagaaggctttagtaatctttccaagtctttttattagttactgacaaaatcagaactaaagtcaaggtctcttacttacctgtcatttacctgttcaatgcctcttttgtttgtacactctgttaaaaagaaagaggttaactgtttcttttggttataactgttatactacaaacacacacacactctcacacacacacacacacacacacacacacacacacacagagagagagagagagagagagagagagaacagatgaaagccatgattaggaacattttatgctcaaggtgagaagaccctctataggacctcgaatgtcttcttttctaaagaacttcatctacctcgggtcagtcctttgatactattcactttgaaaactggtttacctgaaaggaagaggtgtgtgtgaaagagagggtcacccgccacattttatctctctgtcttatttcaggcagacagattcactacatcaagatggtgtttacagttatcgccatgagatgaactagctcatctccaagtgcttaagggatattgcctggttataaatcatcatgtgattctctctcctcccacccccatttacagcttctttcttctttctccactgcccatgtctaaacctggggaactatctcactgcatagacagaaaaggaaggtcagatccaaggtagatctttctttctgctaggtttaacctagtgatagcaacaaaaacagttcttatgcctctgagtttcttgttttaggcagaagcatttgataggttggggatcacaggaaagtttttttttttttaaattctccattaagaagatgctaatgtacttgtgaaggcaagtacattaagcttagtaatggaagatatgggttctaagctgcacctctctgccaactagtagtgagatcctggggaaatcaaacaatcgtttggaaccacatgtggcctagtcttttcattatgacttcaggagtcataattcttgtcttgtcaacctcctggggttgttgtgaggattaagtgagataatagatatgaaaaggcttgtaaactacaaagcatctcatacatatgtgtaaggcattgttattatcaataataatagcaaccacacactgctgcctttgagctaggtactgttttaagtgctttccgtcgataagctcacttaattctgacagcaactctagtgtaccaatgaccagtgctgggcgctgtgaatcagcaggactggcagctcaccctgattagctggtgatttcctgtgttcttgggcatgtcctttcccttccctaggcctgaattttactctttgtaaaagaatcacagactcaggttggatggaaggattcttctgttctgtcatttgtgattttgtcaggcagtcattggccccacaggctaagtcactgattatttctatttatttatttatctgagacagagtctctctctgttgcccaggctggagtgcagtggcaggatctcggctcactgcaacctccaccttccggattcaagcagttctctgcctcagcctcccgagtagctgggattacaggtgcctaccaccacacccagctaatttttgtatttttagtagagacggggttttaccgtcttggtatgactggtcttgaactcctgacctcttgattcacctgcctcggcctcccaaagtgttgggattacaggcgtgagtcaccacacctggccagtcactaattattaatcacagcccacatttaactgagtacagtcattagtttcattctacagctatacagagagctcatgtaaattcctgaaggctgcaccgcctacaagtggtggggctggagttcgcacgttgctcttgtgccctggagtgatggcagcaagatagatgtgggtaactctctagcaatcccaggtgtgttatgttgtcagcatcctcatctaatcaacatgatgattatcattgagccttttaggttttcagttgttgttatcatttaactcctcaattagattccgagcatctcgatggtaggttttctgtactgcaatgtgtattgccagtgttttatgcaagatatgatgcaggctagtgtctcacagtttacgcaatttgttttccgtccatcctttcgatcctttgagcctctcaaggaagcctgggttggcatctgcccaactgtgttgggcagaatggtttttttctcgttgcccgacatggggctgggaaagccatttgaggaggtcgctgtggcatgaatctggacaagtctttctataggggaaacctgtttcaagctgtggctctttcactttctacatggcatatggaccctgatttttctcacgcctgcgtaactctactggtgtctcttggctgtcgcagctttgttttgctttgccattgttttattttattttttctgaagacttggttttcttgggctctgcttatatacaacacaaaatttgtagaccatttgcttatgggaaagagtcacacccacggaaattgggagaaaattaactcttggagcccaaagaaactgacataaatcttataccacgaacatcttcaatttccgactttgccttccttctctgtatggtgctgtaccaagatctcttattgggaccaggtttcatggagggttactggtaactattaacccactcaatgtacttattttaccattaacctatcatgaatagcctgtccaatccccattaaatgacccactatgggggtcattaattcatttatttatatatgaattatctacattcatttatatatgaattattagatattatctacactgaaccaggcaaaattggggataccaaaatgaattagacacagttcctgctttcaaaaacctcatactctgaagaggggagatttgttaattctgtcaagtcatctttgatgcctaccatgaccaggtatcagacatgccactggaactgtggacatctggcaggtacaagcctattcatcacagggtttcaggtctagggaagaaaaacatcatattaataattttacaaataattatgtagttatagttgtgataggtgccacagaggaaagactgagtggtgggaaaatatatatatatatatatatatatattttttttttttttttttttttttttttttgagatggagacttgctcttgtcgcccaggctggagtgcagtggcgcgatctcaactcaccacaacctctgcttcctgggttcaaacgattctcctgcctcagcctcccaagcagctgggattgcaggtgtgcaccacgacacctggctaattatttttgtatatttagtagagacggggtttcgccatgttggccaggctggtcttgaactcctgacctcaagtgatccgcccgtcttggcttcccaaactgctgggattacagacgtgagccactatgccaggccagttgtgggaattttataagggctttttcttttctttttttttttctccctctggcctagtttgtggggagaggtatgtttccccaaagatgtggagttagcctgttgatgtaggcatgggagagtgagcttagacagagatgcctctcatataaggtagaaagccttccatgcccaacccaagtgttgtagaagttgaaaggggaaaaaactttttcaaaattggcttgacagcaaaactcctctcagtgtcttcttttttgtccccctctataaatggtaggttttcgtagtatcatgaccctttttagtaattataaattaatataagataaatttatggtattccttactatatagatttgttaaaataattcacgatatttcatatgtacacacaagctccttcaatccaattagtaagaaaaacacttcatgtcactgttaaataacatgaaaataaacaactggttaaaaaacaaaacccaaatacaaagcgttgagcttcctactggaatctgaatctgggagtgtcttgttgtaagaaatgttttcagacctatcattttcttttgtttctttttctttttttctaaacagactcttgtcagttctcttctgattagtgttcccctgggcttttcttcccaaaataaagttaagtgcattcaagtttctgggatcttctttacatccttttgaaaatgcagagtaaatattatgttggcttctttttgttttttttttttaaattttattattattatactttaagttttagggtacatgtgtacaacgtgcaggtttgttacatatgtatacatgtgctatgttagtgtgctgcacccattaactcgtcatttagcattaggtgtatctcctaatgctatccctcccacctcccctaaccccacaacaggccccggtgtgtgatgttccccttcctgtgtccatgtgttctcattgttcaattcccacctatgagtgagaacatgcggtgtttggttttttgtccttgagatagtttgctgagaatgatggtttccagcttcatccatgtccctacaaaggacatgaactcatcatttttatggctgcatagtattccatggtgtatatgtgtcacattttcttaatccagtctattgttgttggacatttgggttggttcgaagtctttgctattgtgaatagtgccgctataaacatacgtgtgcatgtgtctttatagcagcatgatttataatcctttgggtataaacccagtaatgggatggctgggtcaaatggtatttctagttctagatccctgaggaatcgccacactgacttccacaatggttgaactagttcacagtcccaccaaaagtgtaaaagtgttcctatttctccacatcttctccagcacctgttgtttcctgactttttaatgatcaccattctaactggtgtgagatggtatctcattgtggttttgatttgcatttctctgatggccagtgatgatgagccttttttcatgtgttttttggctgcataaatgtcttcttttgagaagtgtctgttcatgtccttctcccactttttgatggggttgtttgtttttttcttgtaaatttgtttgagttcattgtagattctggatattagccctttgtcagatgagtaggttgcaaaaattttctcccattctgtaggttgcctgttcactctgatggtagtttcttttgctgtgcagaagctctttagtttatttagatcccatttgtcaattatggcttttgttgccattgcttttggtgttttagacatgaagtccttgcccatgcctatgtcctgaatggtattgcctaggttttcttctagggtttttatggttttaggtctaacgtttaagtctttaatccatcttgaattaatttttgtataaggtgtaaggaagggatccaatttcagctttctatatatggctggccagtttccccagcaccatttattaaatagggaatcctttccccattatttgtttttgtcaggtttgtcaaagatcagatagttgtagatatgcggcattatttctgagggctctgttctgttccattggcctatatctctgttttggtacccgtaccatgctgctttggttactgtaaccttgtagtatagtttgaagtcaggtagcgtgatgcctctggctttgttcttttggcttaggattgacttggcgatgcaggctgttttttggttccagatgaactttaaagtagttttttccaattctgtgaagaaagtcattggtagcttgatggggatggcattgaatctataaattacctttggcagtatggccattttcatgatattgattcttcctacccgtgagcatggaatgttcttccatttgtttgtatcctcttttatttccttgagcagtggtttgtagttctccttgaagaggtccttcacatcccttgtaagttggattcctaggtattttattctctttgaagcaattgtgaacgggagttcactcatgatttggctctctgtttgtctgttattggtgtataagaatgcttgtgatttttgtacaatgattttgtatcctgagactgctgaagttgcttatcagcttgaggagattttgggctgagatgatggggttttctagatatacaatcatgtcgtctgcaaacagggccaatttgacttccttttttcctaatttaataccctttatttccttctcctgcctgattgccctggccagaacttccaacactacgttgaataggagtggggagagagggcatccctgtcttgtgcccattttcaaagggaatgcttccagtttttgcccattcagtatgatattggctgtgggtttgtcatagatagctcttattattttgagatacgtcccatcaatacctaatttattgagagtttttagcatgaagcgttgttgaattttgtcaaaggccttttctgcatctattgagataatcatgtggtttttgtctttggttctgtttatatgctggattacatttattgatttgtgtatgttgaaccagccttgcatcccagggatgaaacccacttgatcatggtggataagcttcttgacgtgctgctggattcggtttgccagtattttattgaggatttttgcatcaatgttcatcaaggatattggtctaaaattctcttttttggttgtgtctctgccaggctttggtatcaggatgatgctggcctcataaaatgagttagggaggattccctctatttctgttgattgcaatagtttcagaaggaatggtaccagctcctctttgcacctctggtagaattcggctgtgaatccatctggtcctgaactttttttggtcagtaagctattgattattgcctcaatttcagagcctgttattggtctgttcagagattcagcttcttccttgtttaggcttgggaggatgtatgtgtcgaggaatttatccatttattctagattttctagtttattttagaagaggtgtttgtagtactctctgatggtagtttgtatttctgtgggattggtggtgatatcccctttatcattttttattgcgtctatttgattcttctcttttcttctttattagtcttgctagtggtctatcggttttgtttatcttttaaaaaaaccagctcctggattcattaattttttgaagggtttttttgtgtctctatttccttcattctgctctgatcttagttatttcttgccttctgctagcttttgaatgtgtttgctcttgcttttctagttcttttaattgtgatgttagggtgtcaattttagatctttcctgcttctcttgtgggcatttagtgctataaatttccctctacacactgctttgaatgtgtcccagagattctggtatgttgtgtctttgttctcgttggtttcaaagaacatctttatttctgccttcatttcattatttacccagtagtcattcaggagcaggttgttcagttttcacgtagttgagctgttttgagtgagtttcttaatcctgaattctagtttgattgcactgtggtctgagagacagtttgttataatttctgttcttttacatttgctgaggagtgctttacttccaactatgtggtcaatgttggagtaggtgtggtgtggtgctgaaaaaaatgtgtattctgtcgatttggggtggagagttctgtagatgtctattaggtctgcttggtgcagagctgagttcaattcctgggtatccttgttaactttctgtcttgttgatctgtctaatgttgacagtggggtgttaaagtctcccattattattgtgtgggagtctaagtctctttgtaggtcactaaggacttgctttatgaatctgggtgctcctatattgggtgcatatatatttaggatagttagctcttcttgttgaattgatccctttacaattatgtaatggccttctttgtctcttttgatcgttgttggtttaaagtctgttttatcagagactaggattgcaacccctgcctttttttgttttccatttgcttgatagatcttcctccatgcctttattttgagcctatgtgtgtctctgcacgtgagatgggtttcctgaatacagcacactgatgggtcttgactctttatccaatttgccagtctgtgtcttttagttggagcatttagtccatttacatttaagtttaatattgttatgtgtgaattcgatcctgtcattatgatgttagctggttattttgctcgctagttgatgcagtttcttcctagccttgatggtctttacaatttggcatgtttttgcagtggctggtactggttgttcctttccaggtttagtgctttcttcaggagctcttgtaaggcaggcctggtagtgacaaaatctctcagcatttgcttgtctgtaaagtattttatttctccttcacttatgaagcttagtttggctggatatgaaattctgggttgaaaattcttttctttaagaatgttgaatattggtccccgctctcttctggcttgtagagtttctgccgagagatctgctgttagtctgatgtgcttccctttgtgggtaacctgacctttctctctggctgcccttaacattttttccttcatttcaactttggtgaatctgacaaatatatgtcttggagttgctcttctcgaggagtatctttgtggcattctctgtatttcctgaatttgaatgttggcctgccttgctagattggggaagttcttctggataatatcctgccgagtgttttccaacttggtttcattctccccgtcactttcaggtacaccaatcagacgtagatttggtcctttcacatagtcccatatttcttggaggctttgttcatttctttttattcctttttctctgaacttctcttctcacttcatttcattcattttgtcgtccatcacttataccctttcttccagttgatcgcatcggctactgaggcttctgcattcgtcacgtagctcttgtgccttggttttcagctccatcaggtcctttaaggacttctctgcattggttattctagttatccattcgtctaattttttttcaaagcttttaacttctttgccattggtttgaatttcctcctgtagcttggagtagtttgatcatctgaagccttcttctctcaacttgtcaaagtcattctccgtccagctttattccattgctggtgaggagctgtgttcctttggaggaggagtggcgctctgatttttagagtttccagtttttctgctctgtttttttcccatctttgtggttttatgtacctttggtctttgatgatggtgacatacaggtgggtttttggtgtggatgtcctgtctgtttgttagttttccttctaacagacaggaccctcagctgcaggtctgttggagtttgctagaggtacactccagtccctgtttgtctaagtatcagcagcggtggctgcagaacagcggatattggtgaaccgcaaatgctgctgcccgatcattcctctggaagttttgtctcagaggagtacccggccgtgtgaggtgtccgtctgcccctactggggggtgcctcccagttaggctacttgcgggtcagggacccacttgaggaggcagtctgcccattctcagatctcaagctgcatgctgggagaacctctactctcttcaaagctgtcagagagggacatgtaagtctgcagaggttactgctgtctttttgtttgtctgtgccctgcccccagaggtggagcctacagaggcaggcaggcctccttgagctgtggtgggctccaccgagttcaagcttcctggccgctttgtttacctaatcaaacaactaactgggcaatggcaggcgcccctcccccagcctcactgccgccttgttgtttgatctcggaccgctgtgctagcaatgagtgagactccatgggcttaggaccctccgagccaggtgggggatataatctcctgatgtgccatttttaaagcccattggaaaagctcagtattagggtgggagtgacctgattttccaggtgccgtctgtcatccctttctttgactaggaaagggaattccctgaccccttgcaattcctgggtgaggtgatgcctcaccctgcttcggctcgtgcacggtgcactgcacccactctgctgcacctactctctggcactccccagtgagatgaacccggtacctcagttggaaatgcagaaatcacccatcttctgcgtcgctccctctgggagctgtagactggaggtgttcctattcggccatcttggctcctcctccctatgttccagacatatcattttcattccacatgtatttctttgtttattgagtgccttccatgtgttaattactttattggattcctgggggtgagaaggggaagggtgtgggcagggccactgcttacagctgctcaagttgtgccttgcttgagggcaggagcgcaagtggggctgaagtcctgccctccccactagccaggccaagataaggaccattttctttctttttttttttcttcctaatttgcacaaaagatactaatgattaacagagatcctggtatggaaacataagacacaagtttggttttgtctgaaagcactggtagtttagttggtgaggcagccacaaaactaaccaaaagtaattatattgccagccacaatgaaatatattaaccagagatacaaatgacattctgagggggcttggtggaagtagtttaaccctgatagggtggggagaatcaattcttacaactttcgaagagactagttggatgggcaagttttcttaatagctttattgagacataatttaattaattaactcaaagagtagaattcagtaatttttaatatattcatagagttacacagccgtcaccaagatcaattttagaatatgtccctcaccaaaaaacaaacaaacaaaaccaaaacaacaacaacaacaaaaacacatagtggtcgtttcttatttctcccaaatctcttgcatccggtactaagcaaccacgaatctactttataatctgtgaagttgcccattctggacattttatataaatgtccatacatttatataaacatcatacaacatcatacaatatgtagtcttttgttactttgtttctttcagttaggttttcaagattcatctatgttgcagcatgataagtaggcttttgattggtgaagaatagaagcaagtttaccccaaaatgatgcattagggagagctaagagattaacctttgtaagaaaccacggtctgtgtttgaaaggttgaaagtagactattgggtctgctgactagggcctgtagggaatgttacaggaattgaagttagaaatataagttgggagcagatcatggagattatgaatgcttggactttttctgagatgcagatgtttttgagaggggaatgatatgactagagatgtgtatttttctcccccataatgagaaaaattgatgaagctgtaaggtcccccaggttggtagtggagaaccaggtgtgaaatcatgaacaactccctcccaagtacttttccctcatattccactgcctcttactttttatgtttgttagctggagcaagtagaaaaagcacagatgatttgttttctgttataattattttttaaactactagaggcatggtggaaaattaaactcgatagattatagttataaatgttgttctttgggcacttgccatgaggcagcattttcatggcaaaccctactttgtatatttttgtcatattatgagaaagaggccctcttctgggtcacatgtttgcctctgcaggactctgacctgtcattttagatattgagtctatccttgttttgatttcctttggactcatggccttgagtatgtcccttatgttcatttgacagattcctgccaatcaaatggaagacaaagctatcccgagggtagttggcctgtgtttgcatctcttgtagccaagagaaatccctcattgcttgtttctgagctactcatgtcacagacttttgcaagaggaaggatttttgagattacatggttcaaatgttattaaattaaggtttagtggtccatgaacctcctgaaattgtttgcaaaattatctttaattgtgtggaggtgtatttttctcccccataaaattctcagatggattgcatccctgtaagggggaagaatcatttatccaccaacaatattgaacttttattgagtatttacactatgccttgtagaagacttgtgttatctcattcagtctttacagcccattctcatggattaggaaactgaatcatacagtagttaagttgacttgcccaaggtcacagagctagtaggtgacagaacctagattcagaccctggactctaaccccagagcctatgtcttcatccttctgcattttcaaccttcatgcctgctttgcactattctagtttaccttttataggctctggagttgatggagtctcctttaataaatgggtagtggaggcccagagagaagtgaaacatgtctaagatggtcctgtgattaaagacacatagctgttaacgtgtgacacgaatgcaaacaccaaagtcagattatgaggctttaacacataatttctaaatttaatttaaaatgctcctttttgacctttacttctgctattgattttcatcttttctcttttctccttcttaccccttctcttctttcctcttctgctctcctttcttcctgcttttcctttctttcttcagcaaccattactgagcatttaccttattggaattattggattaggtggaattattggtaattgtgtgttttcatgttactaaaatggactgtccagctcttctgtggccaacatctctttactctagaaggttctcaaaggagttaccacacatgaaagaaggttggggaaagcaaagtacccgaagccagtgctttacactggtacacaggagtaggtacccactttccgattcgggggactggattgtgtcattcattgaaatatgaaatagtgaaggaagcttcacttttatatcggttgggggtagcgtgagagttgtttgagcttttcacttttgagagcttttcaaatgaatcgccttatagttaaagctggagattagaagaaagatcaagactaggaaactctttatttaaatgtcaatatttaattgacaattaactgttgttgatttaaattaaatatatatatatgtatagagtcttgctctattgcccatgttccagactcaagctatcctctcacctcagcctccagagtagctctgactacaggtgtgacccgatacacccagctatttttttttttttagattttgtagagacaggggtcttgctatgttgctcaggctggtctccaattcctgagctcaagtgatcctcctgcctcagcctcccagtgtggtgggattacaggcataagccatcatgttcagccagggaatgtttgaagatagagaaaaaagccctgctttctccattccttctacggtttggcacccagttcatatcccatttgcccagatgctcccttttaatctttcctaatgcaggccatagacattggtctcagaattcttgtaagtctacttttgtcactcaattgtgtgaattgtgtgtttgtacaggtctcctgcatttactaaatatagtggaaatcatatttgcctagagatcagtagacctgtgcattgaatctaggctttgttatttgctatttgtgtgattcattgattgattttctttcagcatcaaattctaagttaataaaatgagattaataataatgtctaccctgtctctctcacagaattggtggtcactttttaactgtgaataatggatgtgatggctctttaaaaagagccttttaaaacaaaatgaatacttttttctacatttacatgtgtaattatgatgtttgtttgttttttcccactctctgggttaactctaaactcctttggattttaaacgcctttggacacttttctttttaaccctccttcatacctaagacagtgctatgtatattgacatttaaatgtacagggctaattatggtttcgtttcttcacttttttgttgttgttgttgttccttttgttacacatttattttgaagattttgttttcctggaaattagtgggatgttaacgtctccttaaagaactcattctttgtctttcctggttccccctcttatcctctgtaacctgtgacctcctcccaccatctgaggtggatgtctcctgaagttcttactctgtcccagcaatgatgaccttagtgtgtctactgactcttaaaacccgtagggacataggatccaactgcctcatagaaaagtaaggccgagagagggttactcctatatttggttcaagtcaatctgggtgctggtttataaacaatgcctattcagtgctctgcactaaggcatactggtgttatgcttctatttttgcctttattatttttaaagttttttggatgaaattactgacgttgatcacatattaaaaatttatgaggattctatttttgggttccattctatttaattctagctgaaatttgcttctcttttttatcctgttatggtacatttgttcctagacataatcaggaatgacaccagacacagactatattttggtgtgtattagtgagaaaatttagtatgtttcttttgtcatgttgaatgtagacactatggacaatgtttaattaattttaattgatttttgttgttgttattatctttctcaatttcctctgctttcttcttacttccttagcatggtatgccacagatagggacacatttcatctgaaagatgtatactatatatggatgtctttgcagtttcttcagtccttttaattacataaaaatcttaataatattaaaacaacaattatgtaaattttcaaaagaatttcaaaagcaatgaagaagaccactgttcagaacctcaatttctgaacctctccttacttttccttcttccttttcagccagtccttgctcaactctgaatatattttgacaatgtttcaattataatatatgcagaataatttacttctttcacttaacattatttttaaatgtcaatgttgctacatattccaaattactttggaattcattatatattattattcttttatttccactagatttatacttaagacagaatctcaagagtgggatatttgggtcaaatagcatttacattttggctcttgaaataactaacagcatgtcatttccaaagagacgttaatcattgataccaccagcagcaaatgttctcattcatcagaccacatttgttttacacgttcctctccttagaaagagataagtatggtttcttttctttagttcttgctaataggatacccaacatattgaaaatggtactccattgttttaattctcatcctctctgaccattagaaatattttgctccatgtgtctttgacgaagtttatgtattgttttatgaagtgtaaattcttgcccttgcccatttgatctattgagtttatgccttctttctttatttgggatccaaaatatttattaactctctgcctgacctatttgttccaaacattttttccaagtctgtttgcctttttagttatggtagtgtatgtatgtgcatgtgtgtgtgtgtgtgtgtgtgtgtatagatctacatacatgtgtacacaccatatatatatggcttataatggggacagaatcacttagcagatgggcaaccctgatgatccaggtatttacgaagggactcaaaccatcttcagttgtctaggtattcagaagaaaaaaattcagaaggctgggcgcagtggctcacgcctgtaatcccagcactttgggaggctgaggcgggcagatcatgaggtcaggagattgagagcatcctggccaacatggtgaaaccccgcctctactaaaaattcaaaaatcagtcaggcatggtggcacatgcctgtaatcccagttacttgggaggctgaggcaggagaatcgcttgaaccacgaagtcggaggttgcagtgagctgagattgcgtcactgcactccagcctgggcgacagagcgagactctgtctcaaaaaaaaaaaaaaaaaaaaaaaaaaaaaaaaaaaatttcagaagtcccggagtcctttccatgatgcatttgaagggccagagagatagaggcatgccctatgtagtacatcttgctgctgtccctcgtgtgtttaccctatgggtcaaatgagatggtgttggagcaatcaaaggatacagaccagtacccagcctttcttgtcaagactttgcctctccttgggatgttcacacacacctacccctattttctttagggatctagttgcttacttattttagacagtacatcctttatggccttgctgaaatgtaactccttgatggaatctcctctggtttctttctatctgtccacctcaattgagaactgatttccttcccctgaacccctcaccttcccatagtgctttagctgtagcttctttattcaatgtttcactttttactttggaccagagatatttatgaactttacaaaatctcttttaaggcagatatttcagttctctttgcattaacacaggacttgttggatgattgagtaagcgtgtgggggggtgtgaagagagggttcatttgttccttcctcgtgacagagctgagaggggaagggcccttgctggtggtggatgggccctgagggttaattgggctgagtgtggccacaaagcagaaagacttgctgtgctttctgaacttacgtaagttacaaacactattaaaatgtcacaaacaaataagagaatgaggactgtacttaggttccatacttgtggtatggaaagctatctaaaataaaattagctacatatctctgcagatttctctgattcactctacaaagaagcaagtgtttaatctaattctgcaaatatttgagactctttaccaggcgttgtggaacatgctttatgactggaaaagatgataaaggcatagtttctgccctaaggagctgtttgtgcatctgttggaggatatagatattttaacaggaagattctaacactaggtaggctgggtcctttgtgataaagtctgcattagaaatatgtgagaagaaaagattaacctgagtgcggtctctcatgaagttgctagtatactcttctttctttatgcatttaaccccaaaattatctctactgagatgattcttcttttgtatgtcaaattttacttggcttctccctcaccctgactcctagtcccaccattttaattttatcatgatttgaataatatcacaagggaatgaagaatttattctttttttcaataggtgaacaaaaaaaagtatgagaaatgattgatgtgtatttcaacattgagaaaacccaaggaattaggaagaaagttctctggcatatcaggaaataggaaatgatctcaccaattgctagaagtggttgctcagtctcttggaaagtgcaccttcagtagatagcacttaagtcatagcatgcgcgcacacacacacacacacacacacacacacacacacacacacacataatctctctgccttattagccatttattctctactgtctttcagtagatgatttcttttaccttgttcctttctaaatattacctccactgggacctaattacaacccctcaaaattcacattacattggaatagatgtgagctcccaatgttatctttaggcattacagaatattagaaactgactgtggttatccattgtgtatgcaggtatataaacctcttttgcccaaatcgttgtcagactgcagtgagaaaagtcaaggaaatatttcttactagcttctgaatgttgtatgaattttccccgaagaatgataataatgcaagctgagactttttatattctaaagtaaacatccaaagccagttttccccttctattaaatgaacctttaactgagctctgaaattgtgaggaaggacatactttgatgcccattattctgttcaatagccatattcagaagagaagtttaattcaaactccagcccatcaaagcattttgcagggttttcaaagcagttattgtaatagagagtaattaaatattactgttttcaactgcttatttataatgtacgaagacattataatgaccccaaagttggtttgcctttagaaaaataaggatacaaaatgctgtgtagaaaagaatatgctatcttaagtctagagagctgggttctagtcccatttctgcttgtgacttagtctgtggccttaggaaaaggcttttcttatcgttgagtctcattttcctgcctttaatgacaaagaaattacaaaccttatatctgtaaggcacttaataatttgtcccctcttcttaaacttgtacaagtgaagttacaacattctatcaagttcagaacatgtagactgtaaaattttacacctacagaacatgtaggtgtaaaatagagtcacccataaatctattacccagatacaggtgcaatctatcatgatcatatttatgtattcctttcaagtctttagctattagcataaattacccatcatgctgtgtatctcttgacatcatacattaagcattttccatatcactgcatattcttgaatgattacaattttaataactttaatatttcattgagtgattgtgccatatcttaattgtttcattatttgaaaattttgcgatgattaacatttatgcataaatgtagcttacttcttcaataatcttatatatgatgtctgagggttgagacacacgggtcagaggttaattttttttttttttttttgaggcagagtctcaccctgtcgcccatgctggagtgcagtggcatgatctcagctcactgcaacctccgcctcctgggttcaagcaattttcttgtgccagcctcccgagtagctgggattacaggtgtgcgccaccacacccggctaatttttgtatttttattagagacagggtttcatcatgttgataaggctggtcttgaactcctgatctggtaattcacctgccttggcctcccaaagtgctgggattacaggcatgagccaccctgcccggcccagaggtgaatatttttatggttatttctatctattgatgacttgttttgtgaaagggattttttttttttttagctttagtaggaatgtgtgagtgagtcagcatctcccctatcatgctagtattaaatatgttgtttttttggtattagcatttctctggttatttgtaaatttagatatgtttccacatgcctcatttccagttatttttttttattgcctttgaagatgagtactttccaatctttaggatcccattcacagcaaatcaaagaggaaacattttagtgagaattgtgcaattgtgcatgtcttataaaaggttctagaacattttttactcacatgaaggactgtttgaataagttgagacatgccttattcctaaatggaaacatagaggttgttaagtagttgttttccctacatttcgtgcaatcacagttagtacaactctcaggtcaattattcttgaattttaaccaaaaaattctaaattgtcttgacaataaacaggcaaaataggtaaaagaaatctgcaaaataagtgtaatgagcaactgggaccatcctagccagatgctgaggtgcatttataaggcaactctgattgaaggaggaggtggtgctggaatagatgggaggtcaaagcagtaacagaacccacccagacataaggcaactgcacgtggaattaattggcaataaaagaaccaccttgctacattccgaaaaggaaggattattctcatggcattgggataattggtcagcgttaatgaaaaacttacatcatgagtatgtttcacaataaaccctgatataaattagtggtcatgttaaaaaataaaacttgcaaaagtcttcaggcaaagaagaaatttgttatatctgtagtaactgaaagcagtaacttttaagtttacacctgaggtcctcaaactttttctgtaaagggccaagtagtaaatattttaggctttgtaggccagatggtctctgtcacaggtcctcaactctttgtgctgcaaaagcatcaatagacaatatgtaatatgtctcatatataaacaaatagagaatatgtaggtttataggaagagtcataatattgtgaatgttaatttcctgacaaatcgtgtcccatggtgaattttatgaatctttcatttttttggcaaactgtttgaaaaagcatttcatggctattttaatttatatttccctgattattatttaagttgtgtgtgtgtatgtatgtgtgtgcgtatgtgtgtgtgtgtgtttggtatatttgtgtgccactgatgtctctttttatgtgaattataggtagagttaatttatctcacttatttcacctctctgtcacctgatgtcccaataccctggagagctttgtgatatctacaccccagtacagactaataggtcactggtttgcttcagaactagaacttctcctgtgcctttgtgcccaagggcctgggacttgacttttggctcagttctacttgtctgctaacctgaccgcttgacagtggattgaggatggagggcactgagcagttttggctgtgcttgacctcctgcttagtttccctccatggtctcttagaaatctgagactgggcgtggtggctcacgtctgtaatcccagcactttgggaggccaaggtgggtggatcacctgaggtcaggagttcgagaccagcctggccaatgtggcgaaacgccatctgtactaaaaatactaaagttagccaggtgtggtggcaggagcctataatcctggctactcaggaggctgaggcaggagaatcacttgaacccgggaggcagaggttgcagtgagccaagattgtgccactgtactctagtctgggcaacagagtgggactccgtctcaaaaaaaaaaaaaaaaaaatgggactccgtctcaaaaaaaaaaagaaaagaaaaaaagaaagaaatctgggtgagttgttgcctgaatcttgtctgaacctgcctatcccctctgggtcctgaaatctaactgtgggtgagatctgcctttgcatttctgttcatccaggtgagcaaacctggagtttggcctcactctgtccaattgtgttccttccaagagataaaactgagaaagtggtaaagtcacttgcataagccactttcagatccatagaggacccacagcatgagattctgactgttattattacagaggtagaagcgtcattttcttggagctgtgtctccgtgtctttggtgtgccacagtcacaggcctgctcctgcccctccctgcaatctttccattgttgtgtgtggtacaggaactgagacaattatgacagagccgagctggtttctcttctcttttggacatcattgtttgtcacaattctgatcaccatttcttcctctagatcacaaaattgtaaaatcactgctatatttacattttcttttgctgcctgggctttaaaaagtactatttatagctttcctttgaaattcctttattaatagtcttccttcacatgtatatcactctgctatttacaaaatgctcttacgtttagtatttcacttgatcagcataaacacccatgggataagctaggcaggattgttgtctccattttacaggtgaggaaattaaggctcagtgaggcctggaaggccctggcctgcagccactgctggaccgggtgccagaactgggtttagacgtcttactagatctctcttgctgtttttctttccgtctacaaaaactccttctcatttatgagtttcaaagattttcttgtctgacacataaggaaattagtggcttttcttgagagatctaagcattactgcatttgcctaatatttcttttactatacctattggtctgagtactttaagagaaaccagtgtctgtaaataatcttccttcttgtcagacatggaggcagaaattttccaagaagagagagaccctgaagacactgtttgttctctgctgttcttaacaagtactgcaaccacaattttggatttttctcctcgaggctttctagttgtaggctgccacagaatacttcggggtcacagattcctattcccttttaaactgtatcgggcatgtgtgttatgtgacctttgtgttctgaccttcagatttagggaactgaagatttaggaagtcttgttaggacttaaatccaagtaaattccctcatgagtacaaagactcatctgtggaggtgtggaatgttggagagaaagggactttcattcatctagccccctgggttagaaaacagggctggtgagtgatagagctgaggctagcgtgcggagatcagactagattcggctttctgctggcttcctccatatcactcagtacttctggagttgtagcatgcctcttccccctggactgggagctttgagagggacggcactgggtgtgctctgtgcacggctcttctagaggtgatccaagtgctttgcataggcactcaggatttatttgcttgatgaatttgaacctgtctgttgttgataaaatatcattattgcccataaggatcttgagggagtttgtaaggatcttgagggagtttcagtcaggattcactataggaaacaaaccactttagatattttaagtggaaggtacttaatacagggtgtttcacagaagtaattagatggactgcatggagcagaatcgaggctgtctccagaaatgaatcacaaaactgcacaaaattattccattttctacaatcaagcaagacaaaaatggtgaagccaccatgggaattactgagttcagtgatacatcacaaaacttgtgaaacagagatcaaaagccatagtcagaatgatggtagctggacactgagacatgagtccagctacttactctttttgtcacggctgctttttgacagccaccaagctgaagactcaatatgagaacacagatgctgaaaaaccccatgtctgtgtcaccattcttctaacagaaaacagggcaaacagcagaaacatgtcttccatcttacttttgcctttcaaatatcaagccaattacatatattttggcagaatttcttttgcaatcaaaccttacctgcaagacagcctgtgcaatatgggaagtttgagtgtcgatctaccatatccaccacattaagggtgatggttttcatatttcgggcatgtcttccataaggctttgtgtgtagtagatattaagttggaaccagagtaacaattacgttctattacatctctacttgtcagtgtagttaattatataacagaatggactgcaacagttttactttagggaatccctaagggggaattcctatttatcagaaaaatgctgtaaggagggaagaccctgaggtgggagagtattctaaactgttttggtttcaaacatcttggaaagtactacatggagacatgcgatattataacatatcagtgcttaccatgtctggggggagttctgtcttaaaaaagcttgcctaccttctatgctgttgctccctcgctgcactgttttgaccccactttcctcctcaccagccaaatacaagttttgcaatgagaattaatgtaaaatggtttctttataacaaactaaataggcttattcttaaaaggaaacatagaggttgttaaaccgttgttttccctacatttcatgcaatcacagtacaactcacaggtcagttattcttgaattttaaccaaaaatttctaaattgtcttgacaataaacaggcaaaataggtaaaagaaatttccaaaacaagcagaatgagcaactgggaccatcctggccagatactgaggtgcatttataaggcaaccttgattgaaaaaggaggtggtcctggaatagatgggaggccactgcagtaacaaaacccacccagacacaaggcaactgcacgtggaattaataggccataaaagaaccaccttgaaacattccgaaatgttgagccttcactgaattcttctgacttttccctcaactctgtgtaaccccaatttagaaatgtgaaatagttgttagtaatcccttccacctttacattgtaccctagtgagtgcatttggatgtattttagacacatttttttttttcctgctccaaattaagaatcaggcaacatattgtccttctagtacttgtaaccaagtatatattataaaatcactgataatctcgtatgtgtggggtcaggtgttaaagatataattgaagtaaacactcttgatttatttttatttttattttaagaaaaagtgacatttttgcttcaggagaaagaggctgagtgaataggttagttgataatagtttctgctaggtttctgctatatcttgcttttctcccgaagattcattttagtaccttctttccttcttaagagcacatgctcctaaagcagggaagcccccaaagcctcctctacttcccgttgctaattgctgtggcctcttatccacgccagtaatgaaccaaaagtatgggagggctttagccatatggaacttctgggagaggacttgactgtattcaggattcacttggactaaacgaccaaaacctcattaacacagtgttttcagtaggtgattatatgagttatcgtcaaaactgggacacttttgcaaaggggcactgttaataattacaccagaacagcaggtataaattggagatgtatggtcatcctaattatacagagccttcaagaacagtgtttgaaatgtgaattaaaacgattcgaaaccagagcttaagtcttagtattttcatgggtttaagtttaccttctcttttatataacaatcacttgctgagatctgatgatgggatatactgtgtattaggtcctaggaatatatagataaagtagataccaattttgtttttttcttcactcacagtattgtaatattttagaccagtgggtttccagtctggcttatagcatactggagatactagggcaataatgcattttatgcttcccccaaattaaagtatgttttgccaaagtgtgatgatttaaatgcccctgtaatggttttattaatttttctatttatacttggggttttgtttatgatttggcatgaagaaaccatttattttgctaaggaaaagtttgaaagctactggtttgagacttaaaaatttatctttaatatttggttataaagtcgtaaggctactttttaaagaggggaagaactagactgattaaagctgaaacacataaagatgtaaactgagtgggaaacaaataaattacctgaaatatataaaggtctgctatgtattagaggttttgtgattctagagggcacaggtaggaccaataggtggtacttatgggaatacaggcttcagctgcagaaaactttctagcagtcataacttttctgccatggaaggggctgtcttgtaaggtaatgagttccttgtcattggacatgtacaaatgaactcacagatggtgggtaagcttcatcttgagctccacattagataaaatgtcttcattaacaatttcacacttcaaggatgttaaacttctgtattggtgaatgttgggtcctttgctacttctttaaaaatatctaaagtgtgtgtgtgtgtgtgtgtgtgtgtgtgtgtatgtatttgtgttttatttccccagaacattagctgagtatatttttcatgtattttattttatatttttacacagtggtcaataattgataaaaatacagaagctactacaacagttctctcatcaagggaaacttaaaagggataatgtccatagatgtgattctgaaactgatttgaaacagcctggttcatttttactgtgttgccattggttaatgcttaaccagattttgtctctgtttcaaaatcttgaaataaaagtggaacaacttccaacatgacttaagaaaaaggtccccagttgaaaatgcttccaatcgttttgctattaaatgtgaaattgcaaaactagcctctcttacaaaaactagtgagaagcttgcctgtttttcataccatttcaaatactgagaaataatttctctaggctcttggaattagagttaaataaaaattatatttcagagtatataatgcatgaagttggatttctttgttttctaaaactgtatctcatggtccttgaaggttgataatttatatctctggtaccactttatttttctattatttgtggattaaaaattttaaatttagcaatatacttatattttgctttagaataaagttgatttttaaaaacttatttagagacagggtctcattctattgcccaggctggagtgcagtggcatgatcgtggctcactgtaaccttgaacccctggtctcaagtgatccttccacctcagcctcccgagtagctgggattagagaggcgagccaccattcccagctaatgttttttagaaattattattattttttttttccagagacacatcttgttgtgttgcgcaggctgatctcgaactccaggcctcaagcaatccagggtctcctcccaaagtgctaggattatatgtgtgagccactgctcccagctgagctttttcttaatagatatttaagatgatatgtaattagagaatcggagattaaactggaaactttaatttacaataacaataaaatattaattcaataatagtaatttaaattacaggccaggtgtgatgactttaatctcagcagtttgggaggccagggtgagagcaccgcttgagcccaggagttcgagactagtgagaccctgtctttacaaaaaaaattaaaaaatttgccagacattgtggcacacctatagtcccgactactttggagaggctgaggtgggagaaatacttgagtctaggagttgcaggcttcagtgagccatgatggtaccactgcactacagcttgggcaacagagtgagaccttgtctctaaataataataatgataataataataataaaaataaacaaataaataaattataatgtccaaactcaattcaaaagctctaagctaatttatagtagttctgatgtaggatacaaacaacacagttgacagttttgtgaacaatatgatgttcaaaaggctgaagtataatctctaactccccatcttgttgctatgattactcttagcagattatgtggcctgaatcaacattggttcacagtcacaagcagtgttatcagatgtaaatatgtcttaacgttcatcaatagtagactcatattcattgaaggaaaaattaagaatttctactttttcaagttataactaaaattgcttttaaaatcttccttattttattgagatatcaaaataaatattcaaaaacagaaaaatacaaacagaatcattaaaaaattaagataattagaacatcctaaagtggtagcaaaatctcatggcctgactaatggtcatgacacacttgtaaatggatatctaaaatggagtgtttacatgttttaatacaagtttgaacaagctgtcagggaaacacagctaagtgagctgcagttaacttgcagacttacacagttattggtaggtttagaaatagaagatgctagataaccgttaaagagattgctaggtctcattagagatcatattggtgatttttcctatcgtcactttttcctgggtgaggggcaaaatctttatgaattaggcacttagcgtctcacctttacaaatccagatttccacctttagaagcagatttactgaactcaaagaggtgcaggctattgttgcctgttttctcttggccttgaacagaaaagcagtctataataatcaaggacttagaagaaacctgctaaggagcccgtttttttgccagcactgcacactccacagactagccataacattgtggatcataagaagttgtgggaggagattttgaaggtcatcattagttgcttattattttaaatctgcagaaactgaggtccagagagaattcacattttcttggttactttgccacgtggaacaattgttatcaaatgtgacctggaatgcaaggttggggccatttatcttctgtgctaattttcagtgccatggttgcgaactttcttggcagagaaattgtttacttctgtgccctattccattgccttttacctaccccatctagttataatctagcaatagagttataagcttgtgtaatcaaactttcccactgcagatgctctttggagacagaatatttgggtttaaacccagcctctgatatgttctagctgctctattacattggataagtttctttagcttctctaaatctcggtatttgaatactcaaattagaagacgtaaattatttcctaagatttctcctagctggggttctctatgaccttttagctcttaagtagtctgtcctggctattgtcaaccatgtctttttttccttgactgatagaaactgtggcaaactaaaggccacttagtcagtatttgttccgtccttaaccttctctcctgagagtcctgatctttcagtgctgttgtttccctgtcagggttgattgtttccttttcgagtgccgttctgaatctgaagtgaaagtgcagcgtggaggcatgtcactgttgtgtctcacttctttttcttttttttttttgagatggagtttcaccctgtctcccaggctggagtgcagtggcgcgatctcggctcactgcaacctctgcctcctgggttcaagtgattctcctgccttagcctcccaagtagctgggactacaggtgtgcacctctgtgctcggctaatttttgtatttgtagttgagaaggggtttcaacatgttggccatgctgatcttgaactcctgacctcaaacgatctgccttcctcggcctcccaaagtgctgggattacaggtctgagccactgggcccggccgtgtctcacttctttatctgagacaatgtttactggtctagacctgatgcttctctcccttgctgcttcgtagtttatttggatcctgaaatgccgctgagtttttcttgtcacctgcagcattgccaagaacaaggagtgcaccattagtgttaatttattttttctggtactctgtgcaaggcagatgggcatttaatgtgctgattccaaccctaccttccctcatctacactccctggtctcataggagttaaaacatagttttgtaagaaaccttagctccttgaacttgtggacttgtgggagaatcatggaaacatgagagttagagggaatggtagtggatatctaatctttagtgtacagataggaagggtcactgaggttcaaagaggttaagaacgaaagtcatagacccaattagtgactgagctagatagaaagtacgcccaagtcctctgcatctaagtctagtgccttttccagtttttccaaatgtctctcagatagcctatataaaggtttggcatttctgtagcgttgttctctcgttacctcttctgagcaatgccagctgtccatgcagagagtggggcacttagccagtgctgggccaaagctgtctgtaagaagaagttgagtgaatacattgacattttcagcccatggtagatcctgctttgcccttccggctctatgtgacctgatgcttcagaggaagagtgaatacatttgctgttcaactaacaattgtgtgtaattttcagcctgccttattcttcaatgctgtcttcccacgcctccaccacatgccacagcatatctgcttcgcaattacgctggtagggacttaccccgtttggaaaaggtttgcctaaatacttatttacttgtgcatgatacatcttgattgataccttgttaatctctgagatcaacccaagaatccttccttcaagggggaggatagaagagtcagggaaacgggtgacagaaaaagagaaaaagaggactgtgcttcctcactgatgagcaaagaggagaattacagatgatatcaaaacaatgaggagaatcacgggtgatatcgaatctgctttacttggcgttggctacttgtaaagtcaagatctttcatagactcataaaagcttgtgagcagagttgtcatttgtaccatctaattccatcactacatttttcgagaaggacacaagatttcagagataacggaagttacacagtgggctcatggcggagccaagactagaagctgggtctgaattctgaagatcaggcatctttccactaaatactgagatgtgaacaataatggagagccgtatagcccagaggggaaaccacattataccactttagtggatgattaggaaagcagttttgaaattccaggaaggtactgacttttgtataaagagaatgtttaaaaaaaaaaaaccttcaaagttataggagagtgttatttaaattgtaacagcttgtttaaatgaagaaaatgttgctaagggacatgaatgctaaacgttagtctgccatcagctacttctgatgtttaagtcaaatagtccctcagttctgtggtgttaatctacgtcccttttctaatatcattcatttattcagtgcacactgaccaagagctaggccttgagttagttgccaggaagatatagggactaatacaatgtcatttaaagattaatagaaatgctctaagtcaattattctcaacccttgaatcagagtatatacataaagatccccatatgaggttagtgtgcagactgttttgataaacactactctaagtttattgcactggatgttggataatatgatgtaacggttgtttgtttttcagttttggtgatctatataaatctttttagaagagtagcatattgatttggacgaaaaaaaggaaaatatgaccaaacactacttctttctgtttttgtgggtgacagtgacttgacattcacatggtatcctgagagaggcttagtagctttgttagtattaattgtcagtttgcctatggcactaagttttcccacctacgtggggcgggtcctggtcatcacatagccttttgtagttatttgctttctgttgtgccttgattttttttttctgttgactattggcttcatcactttgtggtcctgtggcttattatgattagatttgagggtacagaatagagaaaacattatggcaagtagaattcaagagctggaatggaaataataagagcaaaaactactgttaagtgctgatttcctttgaattgtggtgttttcctttcttctccaaatagggaggtagtacagagtgaagaccggagatttggagttaaagatctgtgtcccagcttcagctttgctatttgttagctgtatatccttgagcaagttattcaacctcttacagtcttactttcttgatttgctagatgtgggtaatgatagtgctacctcatatggcagtcaggatgactgtgtggccattgaaaatttgctagacatataataaaccttcaataaacacttgtttattgtcagtctctagtcttcttaggaccgctgggggaacagacagaagagcagcagaggagttgataagtgaaacctcttaggttcttcttaattgcttgcatgtgacaatttctgaaagagcaatgctgaggaagcagcagctccccagctcccttcagcagtaggcatcttgcttagaggagggccactgctcttgctttcctgtctgctgatggtggttgtgtattctcagagcctctctggaaatcttccctttcacttcttgctttcatgatgattatgaacttcgagtgaaacctagctagaatgaggggaagtaagagcagtgtaaatcttggtccagcaacaccagttctcaccactgcttatttttgtgtttacatgggtctctcttagaagccaagagccccaatgatatgtgctagttcatctgttcattaaacttgtgaagtttcatcaaacccatttatcaaaatgaagggctgtaatgaagattttagagaaagaaagcactctaaaatattagagctgattgggactttacaggtattcattttgcaaatgagtgtcatctcttgttaaaggtcacacttgtatagctgagactagaactggggccacagggactctatgtctatactattggatttatcactttccttggatccatcctacatgattcaatttttaatacctggagttttcactcttgttatcttcctattcaaggataaaagctctagcttcttatctttatataaaacctttaaaaggcagaactcatgttatcttttaaaactttcccctaactgttctccctgaatccctcattttggtgccgctggtctgatccctgtcctacagaaatgccttgcttcatacccaagctcacagtattatttctaatctttgccctggttactccagttttcttttatttactcagcattcaaagtcctggttaagggctacctctgccaagcttatgctagcttttctgacatcccccaagatttttcatgtgctttctgtgttgctctctttctcttttcacatttataaatatttcttcctcaaatagtctttgagctctttgagtaaagaataagaatctgattcatctatagctccagtgccaggcaaataaattcattcattcattaaattaacagacatttttattgagtacctatcatgtggtagcccctggaattataaaatgataaatatttccactctcaaggatttgcgagtttagtttggggaacaggaaagcagatgggcagagcaccatgtgacgaatatgtgacaacagtatgtagatgctgtgggattgtactataaggatgtataacttgaactgtagaatatagtgcaagatttgccttcaaggactagtagaaagtaatgcttatgatctaaattgatgcatagtatgttggaagtcatttttagacaagaagtagcttgtttcagagggagcagagatcaaacctaggaaaaaaatgtgaatttctatcagaaaagtactgcaaaatgacctcagaataaatagaaaactactactattatcatagaagttactggcaatatgattaatgtctgttaaaagaagatgtatttagatgactttatgctgaatttggataacctttaaaaaaccagataattccagtgtagttattaaatatcctagacagtagaggaggttggagaaaactcccctatcaaaacctaatcatgataagtaaaacaagcagaaaaaaatgctataaaatgatctttattatgattatatgtacacaaattatagataaaatagcctagttaattcattaatatatcaaaacacaagtgtaacaaaggatttattctaggcatgcaaagatggttcaatatgtagactttatcaacatatttcattacatcatcaaattaagggagggaaaaagagttgaatgtatcagtggttgctaaagagggcactgcagctgtaactagataggattttattccacaaatgccaagatagttcaatatctggaaatctatcagcatgcttcattacatcaccaaattaagggaagataaaagagatgattgtatcagtgaatgctatagcaattctagaaagatatgagtaactaagaaagagtaacgttcattcattctcccatttctatgtaacatacttgtttaaggggcttcctgcctaggcattgtgccggtatagtgagactagttggagtttccaacttgttgggacatgtaggcaggtaaataaatggctttcttgtggattgttataagtatgccgaaagtactaaagagcctagaaaaaggaattaggctactcttccttggagaagttagggaaatgttcacagagttagagacatttgagctgagacaatataaaaatatagggcttggtagaacgtgaagagagggaaacggcattgttgatggtgaacacagcatgagcaagggttcagaatcatgaaaacttattataaatcctgggaatggggtcactgggtcactgctgacatgcagaagaatggtaagagaagatactgaggaggacatctgcaaacaaatgattggtcagaagatgggcctctcaggaggagcagctggaggtgcttcttcatggagggcagcatgcgggtaatttatgatgctggggataactgaaatgactgtggagccaatgatttgcatattgatacttacattttatttatactctcccagaaattgcctgtttctttatatctgtgctatatccgaaaagccaagatgatacagtcagtcagtaacttgggattactatgaaaaatgtgaatctttgcttaagaaaatactgcatcctatattaaccaatttttcaaccttttattataaaatgactttagatttatagagaccttccaaggatagtattaagccattttaaaaattataattaacatttatactaccaatgtgcataatgcattaaaagttttaaacctttacttgatcccttttatttcacacttatattcactttagtcatactgaaagcaaaccagtcacttttatcccaatttagtagaagaccaagcctcaattaaaagcaaaagcaaaaccaaaattggcatttctcagccatgtgagatgggtttggttttggtatttagaaaaaaaaaatcatctgaagttattccaaatgaacagctaaatttaaaaaccacgagtaaaacagacattcattggtagtttttctatattggttttgtgctaggccttaatggtagtttataaatgtgtaaaatatggtccctacccttttaaggaactcaagtttagcaagtatgtatgtgtctttgtgtgtgtgtatatatatacatgtatgtatgtgtgtgtatatatgaatatgtaaaaggtacgggggaaagaaaaagaaaagaaaggccctgtaaccagagtgaaaagccagtaccatcactggcttcaatagcatgtgtcctgattaccagtttagagtctttgtcattgattcatgttatcctcgtcttttaagaaaactatacatcaagctgttcttccaagcaagatggtcataaaattgccattgactttctacaagaatagaggcttctttttttctcactttgcatagcactctatactataaaaagtactttaatatcatctcattggttgccataaaaattctgagagttaaggaagacagaggtttatatgtttgtttgttttttgagagaaggtctccctctgttgcccaagctggagtacagtggtgcaatcacagcttaccgcagcctcaatctcccaggctcaagtgatcctccaacctcagcctcttgagtagctggaacaacaggtgtgcgccattatatcctgctaattttttaattttttgtagagaccgagtctcattctattgcccaggctggtctcaaactcctggcctcaagtgatccttctgccttggcctccaaagtgctcggattagaggcgtgagccattgtgcttggctgagtcctctgagacagtgaaactatctgaggctctagaggcgatgccgttcaaagtcatgccacttgttggtggtgtggactgatgtgaatatccaggcaacactgtttcccagctctcccctccaccctgtctctctattactatgccatgtactgaggcctttgatttctgtgttctgatgctctttgtctttacagacatctggaggtaattgtgtagccctcttaattaattcagttcaattaataaattagtaggtggcttttgggctgggggcgcttacagggtgccttccgggcgtccctgtgctggagagctcttgcaatcaggcttggagagccctcctcggcagcagcctctgagtctcatccccagcaggcaggctgactggagaggtgattggcttaccctgacagaggagacatttcctctcttcaaatattatatgcaatctgatcagagcagcatctgggctgggctgattgttcccctcctagtttaagcaagcttttcatgaaggtccaacatggtatcagctcaacatacaagttgatgggcatttctttgttgtgcggggctgacctttgcattacatgtgttgaatattctatcctccggtcctaaattctaataattgtcccagacgttggggcaaccaatatgcccctcttccccttttccacataccccttggtggggaccagagctgctcctgcagatggatcatttaaaagtgtcctgccaggtatctgttaaaaccctgtttccaaaataaactttcagtggttccttaatgcctgaagaataaatttaaactcaactgtggctgctgagctgtctgtgctttggtttcaacccaccttttagttcttttgcttgctactttctgttattcgccctccaagcacactaaacgtaaatgctgtgtacttttctgcctgtataattttgccaacatttttcaggttcaaccctacttagcactcaaacccagtctgtatatcacctcatcaataaaatcttgttaattctgcccccaccaagaagtgagcctatctttttctgcatctcagcaacacttgttcttaacctcacttaggtaacttagcacttcatttaggcataaccatttaattggtgagataattaatttaatagattattaataaaattcaagctcttttccatcctcctaccataaaatctccttcaagttaggaaccatttcttattcatatctatttcccaagagtggctaggcactaaaataggtaactattggaagggagatattcaagtttgaggcagtgttctcttcctgctcctcctctttctctttctttctttctttctccttttcctctccttcctccttttcctcctcctctttctattcatgattcctctgcctcttcatttttctttcttccattttctttcacccttctttccagagaactttatcaggatgcatttagtatggattaaggtgaaatagcaatgaaatgaggagtattgtcttcgttttcatgcttccataaaaacagtgtttctttttcattgcagattccaacaatgtctcacccatcttggctgccacccaaaagcactggtgagcccctcggccatgtgcctgcacggatggagaccacccattcctttgggaaccccagcatttcagtgtctacacaacagccacccaaaaagtttgccccggtagttgctccaaaacctaagtacaacccatacaaacaacctggaggtgagggtaagtgctgggatttcagagttggttacttggagtaggaaaattcagttatataggtgatttgtagtacaaagttgtgtcagaaaaacgtagtttgtgaattcacagcgtgggtgtcataggctactaaaagtaaaggagcccccggaaatagtctagaccaaccccgtcttttaggaaaaagactttttatgggttatatggctatggttacataatgaaatagggttagagctcaaactagaaacctggcctctttagtcacagctcaatgcctttctactgcgttatcttccacctccagctcattctcttgtagggttttagctaccagacagtcatccctccctcttgccgttggacaaatgtccacaaatgctgccaagcagtagtccaatcagaaacttatacaaagtgaacctaataaagtgcatggaattgtttacctcctctggctgtttttcttcccttaggctgctgaaggataagttgtctagagtgttctgtgagatctgcatttgttgaatctcccagacaaatatgagtgaagcctagttccaggggttttaataacaatgcattcagtttacatcaagtagagtttgaaggtctacgtgagctccagctctcatgtgtatgtatacactcacacacgaagcctcagaggcagtataaatggtaccatactctttggttgaaaaggttccatatttttaccagtgaatgttagcagcttattcaaactcaagaaaaaataacttaaaataaaaaaaaaaaaaactgaagaatattagacttctaggagctgagagagaagaggcagtgaaaggagatttaactccctttgttttctgtccctgtcccaccattaaaaaaattattaatatcttaccctcttcatgatgtttccagttgcttcttggatgacattaatgtttgttttgtcaatattgcacgcaagtgtttcacactctgtgatatagtccagtcctcctcttttctttcctgtcctctcctgcgcccaggaaacactttactagtctgttagtattttgggtctgatgccagaagcctagttcagatgtctagcttgtgtaaggtgaacacctaggttgggtggtagagaggatcaggcttcagcatgcatggctaagctgcagctgtggatctttggatatccttttcctcagaaagtacaagaacgagaccctcagaaagctgctcttgaaaaacaataaacgaagcctttggtgctgtactaatctctgtagcactccatgatgttttattgccttagaaagagactgcatctttgcagttaatcaagcacttagtggaactggctttctttgactcatccttctttagtgacttcagggcttgggaatgggatctggaagagaatctctcttcatagggacaggaggagccatatgttggcttcctcatttatggtttttttttttgtttgtttgtttttttttttttttttttgagatggagtttcactcttgttgcccaggctggagtgcaatggcattatttcggctcactgcaacctccgcttcccgggttcaagtgattctcagcctcagcctcccgtatagctggattacaggcatgcactaccatgcttgactaattttgtatttttagtagagatggcgtttctccacattggtcaggctggtcttgaactcctgacctcaggtgatctgccagcctcggcttcccaaagggctgggattacaggcgtgagccaccgcacctggccctcatttatgttttcaatgtttccctttgtcagcttactaggggcattgttattttgtctcctaacttttggggaaagcttcagtggacctctctctaatctgaacagaatacagacatggccagttatagagcagaaggcaaaggtgtgaggaagtctttgtaggtatgagagttcttataggcctgagcgttatggtgagggcaggtcctatattaagtgggctcataaatggcatatatgagataggtagaagagaagcatataatggcctcgctttagactcctttactgtgaatttgacatgccctccttgtactatgtgtggttcacccactgtcttactctctaggaacactgaagtgatttgtttgcgtgccctgcagcacagtccttggtcccctctcaacatgccaccccacacgtttttgttacctgaaaattctatttgtatcactttctccaaaatggctaggtgcagcctaggtcagaattaatcgctccctttcccgagtttccacatcttattctttgacttatccaaatttctaccacttttgttattgctcctgcttacattctgtcccatattgaacatgtagtatatgccaggctctatgctttctctttattattttattgccttcttatgtaaccctacaaaatgtttttttttttttcttataaagaaatggaagcttaaaggaggtgacattctctatgatttgcttggagtatgtttctgaactaaggctgctgtccatatccagcatgcggtactgcctgtccttctattcacagcacatgtggcagcaaaccccatattacagtgatacatccctgcatcccttataagaatatatataagctttgcttcctcattgaagcaacaagacatggtttctcactcgtccttatgttcctcatagctcatattatgctactgtgtttttagtaggaatggttgcatatggtcaaatgtatgtctgtgtgttcttatgtatgcatatatatttggatggctggcggatggctggctgggtgagtgcactgctcagtgatgcttctccaaagcagtttggaatatggtataactcagtcttttgttttctgaaattttggctctctcttgcatttctgccaattctcactctttttctctctccccctctctctaaatataataacctttaccttttctgaatatgcaagagaagaaattttcctttaatatataagttaaagacaaatcttgggaacagtttatggacattcagactttttaaaatagaagctacatttctgcatctgctgtatgaaacaaagatgtatccatgtatttgttggaagtagatttgcttttctttatatttaatttaaatgttatcagtgcattctgttactctgaacatttttgtaacttacatctattgtgtttgtttacacatttaaacaatttataaccattccttttcgtttctttttttcatttagaatgttctatactctcagtgaaattcccaagatagtaggtagcacaggttttatttccaggatgcattggtgataccagcttatgctctgtattgcctcagctcatgctgtttttggcttttagagtgtacttgtcccccagtttcctgcttctacagtcttttaattcattgcttaaaagttgacctccacgaagctcaaccacaaatgcagaaagttagaactaatagaaatcacgcaatccatcttgttctgacgtaaatgtgaaaactgcagtctagagagtgtaagttatttgttcagagaagcacagcctgctctgagccgagttggcactcaagtcttttccctctaactctagagttacccaaaccttgtactatattctaatggcaaactgttctttactaccccataccctcatgcattgcctacaattcttatgacaatgtgttttttaatagatttgcttgtatatgcacctgtcttctctagcggagtctgaactttgagagtcaggggctgcctgactcatgccttttccctcaacagcacctagcaggatacctgacacatactaggaactcaatagtgtttgcagaactgaattaattgataaagcacagtaatataaacctacttctccagacacaggttctaggttctcagctacttattagacactgtggttctgcagtttcaacccacgtctttgcattacttttccttcctatgcccattctttgaacttacatttctcaccttggtgttacgtctgtaatctctggagtttgctttcccatgttttaattctgactgtgaaagtagaaaaatacccacatgttttccacatcaacttatctttctggggtacccatatttataatttcttttataagatattctgataataaccattttctaaagggctttggcacactgaaaagtggggcatgctttttttcccagttagtagctctttagatctcagggtccttttattttacttccattgttctcatttcttttcactgattttgtaacaagttgtgttttcatagctaacttagaatacccctacatttccaaatgctttctctgtgttcaatgctttgtgcttacgaactcatacttattttttaattaaatttagtcttcttagagattttttttagttcaatagcttttggggaacaggtggtttttgcttacatggagaagttctgtagtggtgatttctgagatttcggtgtgcccattgcccgagcagtgtacactgtagtcttttatccctcacatccttcccatccttcaccctgagtccccaaagtccattatatcattcttatgcctttgcatcctcatagcttagctcccacttataagtgagaacatacaatatttgattttccattcctgagttacgtttagaataatggtctccaactctatccaagttgctgcaaatgccattatttcattcctttttatggctgagtagtatcccatagtgtatatataccacaattttttatccatttgttggctgatgggtatttagaagatatacagacaataatcatatgaaaaaatgctcaactcactgtccgggaaatgcaaattaaaaccacattgagataccaccttactcctgcaagaatagtcataattaaaaaaataataaatgttggcatagatatggtgaaaaggggacacttttacactgttggtgggaatgtaaactagtacaactgctatgaaaaacaatatggagattcactaaagaacgaaagtagacataccatttgatacagcaatcccactactgggtatctacccaaaggaaaagaaatcattacatgaaaaagacacctgtgcacacatgtttatagcagcacaattcttaaagattttatagtgttaactatttcattttttgtgaaattattttggtatatatttatgatgttgttccatcactttctattctgtgtaactgatgacaacaagataagataatgcaatttttcttctggtcttcaaaatactagcctttagtgttgtttgtcctataatctgggttttcactctgctccaaatcaaaaaataaaaagatacaacaaacaacaaccaccccacccccaaaaataaaacaacaacagcaattaaactcagtcttagactttgatggcagaacagtatagttctttttctgtttttggtaaatagcaaagcaaatgaactttcctactgtactaatataattttttaaagatggtttttgaaattatcttactaatacactctggggattagtgttaggttgcctttaatggcaaaaaccacgattacttttgcaccaacttaataactctctctctctctttctctgtctctctctctctctctctctctctaatttggctgaatgaaatttgataatactttttatccatcattaaaatagataatcatttggaaagatttgtaaagttcacgtttgtgaagctggagttgtcttgtggcctagaattcactttctttaatttctgaaattctttttaaaaaacatttttatgttagatttttgaaaaaacaaattggcatgacatgccagttctcactctttttctttctccctctctctctctaaatataataacctttaccttttctgagtatacaagaggagacattttcctttagtatataaattaaagacaaatattgggaacggtttgtggccattcagactttgggtctgcattaggtaccaattcaacgtgatcattttggtggaatccttttatattggtatactcttttatagtttatttagcagttgcatgttcattgtcttttcatttcagtagaaaattcttactgtcactctctgaggtaggtagaacagatgttattgtcattttgatgatttgtaagtagtagaagtggaagagcttaataaggaatcatgtagctagtaaaagagtagagggagaccctcacacctagggctcttacgaattttaaatgctttcgtttattaaagcgttggctacacagtctgatgtctcctttaacttcattattttattatttcatgattcttctttgaaattaatttcaaaatggtgaccctttttacaaaccagctttgtgaatattggttcacatagacttgtcaagatagatcaagataggtgaggtgaattatattaaatagggatcctaagcctggattatttttttatgacatctttctgtgctttctgctactgtgaggttacgaatgtattattccatggaggggaaacagttatagatgattgctaatctacccatgagtttggggctgaattgatccagaacccaggtttcctaaatgcactcattcagctgtaccactgtggtttatgggaaccaggcaagtttggagcttggttcctaggaactgatgagtcctggattattgatgcttggtggagaattagccattagtgatgtgaagccatgtatcctgggtaggcaggacacatttgttttcttagcagataactaacatgtgagggaaatggatgtccacttatggcattatatttaaaggaataatttagactggattttccccattatttttgctgcgaacgtatggtcctcatggtgtgcttttctgtctctggagtcttattgtccttttccccatgcaaagagaatcttgctctgactttggagatacaaatgggaaacatcttttttggaggttacaaatgggaaacatctttttgtaatcctgacagtcctgttaattgcaattagagactgcagttgtaacatcttggacgtttggtataagtatgcgtgttatgccatgaggatagccacaaattcacggaaacatcaggaactgtaatgaagctcgggtttgcctgtcatgccccttttctggatgagcgtaagcatctcgagcctcatccatcactgcacagtgcagtgcatgagttttaattttcaggtcctcagggggacaaaagaacaagctgtgtattcattaaaggatcaaatattaattgtattaatttgatctttacactgcatctttcagcagagaaattaacttgtaattcttggagtgacatcagatcttaccaaatattcttaggccttattgatgctcaaaagtgccaagatgcagccctggcttgatggtcagtgcagttacattcaagcttcagtttcatcacttggccttgggcatgatgcttttctaatccatatcctctttaattcataaaatattagctggtaataccaactgcctcacaagattgttttgaaagccaaatatgatgataaatgtgaaaatgtttttaaaccataaaataccttataactctaaggagttactattatatacttattcagcagtcatttacttaaaacagattttgtgccagatactcttctaggggctgaagtaatggcactgagtgaaacagagactagttcctgccctcttgggatgtattttcttgctataataaaaataacattattaataataatagtgataacatttgtgaaataaaatttatttaataaatgcattttataactttacatataattaccaataactattcaaaattataaaaaatactttaatataggttaagtaactctaatccaaaaatctgaaatcttaaatgtgaaaaaatctgaaactttctgagtgctaacacaatgctcaaaggaaatgctcacaggaacattttggatttcagtattgtggattagggttgcttagctggtatgtgtaaatattccaaaaatccaaaaaatctgaaatttgaaacacttcatgtcccagatgttttgtatatgcgatacttagtctgtagtaatgaatatgtgataatataagtataataataatttagcatgttatccataagtactcatgtcattagcttctaacaacagtgatagagatcacaatgcctcaacactatataaactgtaaaattctagaaccagggtgaatcttaaaagttatctaatacaacccctttctttcctagatgagaatagttgagaatgtattcactaatacatttcagcgaagtacaggttctttgcccaggagtgctgtaaataaccaatgaaaattcttgaatgcaggcaacaatttaatcttcatttcagagactcagagaggcaggtggcttgttcagtattgcagattagtaagtggggaagccaagccatgatcctggggattccttctctggttgccatagacacgttttgggggacttgtttagaagttacagtgattgaactaatatacccgaacaaagtggattggatgttttagaacaaggagaagtccctgtattgttgacagaaatctcttttattttgtaacttgtcagcttaattaactactgaaatgagttccttaataaggtgatgggtgcctcctaattcttgtatggttcaaaaacaataattaatgctgatttgtgtggtgagatacatattaatcatctttatttttgaattatacaaatatacaatactattgtccctccgtattttacatctgaagagaatttaattgcttttttgataataaaaataaacagagagccacaaagagatatcaccacacatgtattagaaaagctaaaataaaaatttgtaccagatgctgctaaggatgtggagaaatgatctctcacaatgctggtaggcatgtgcaaaattttgtagccacgatggaaaactctttggcggtattttacaaaagtaaacatgtactaaccatatgactcagcaaatataccctttggcatttaatccagagaatcaaaatgttatgttcacgaaaaaacctgtacatggatgttcatagcaacttttttttttttatcataatgacaaaacactggaaacaacccaaatatcctttgatgggcagatgtttcagtgaagtctggtacagccatacaatggaataataccattcagcagtaaaaaagaatgaagtattgttggtatatgcaataacctggacatgcttaatgaaaaaactgtctcgaaaggttacatgtattatatgatttcattttaagacaaagctctagagataaaggacatattcatgattgctaggggacagaaatgggtgggtcgggggggggcaagtactggtcattcctacaaagaggacgcagcaagagtctttgtatgggtggaacagatctgtacctcaattggagtgatgattacatgaatctatacatgggataaagttacatagaactgtatgcacacacaaatcaatgcaggttataaaatggtaaaaactgagtaactcctagttaacaataaggtaacaatgtcagtttgctgggttttcgaatgtattacagctttatgagcattaccatttagggaacctgggtaaaatgtacatggaaactctgtactatttttgcaactttctatgagtccatatttaaaaaaaaattaataatagtaaaataaaggaatgcatatagatatcttaatgtattcttctcttactcaaagtgctatcttacatgccatctgaattgcttgcatgatactttgaaagatcactgctatatgtatccctgccaaaatgtatggcttaaacctgtggttttcaaagctggccagtcatcagaaagacttggagaacatttttcaaaagaaaaaaattaaagcaagtcctaggtcccatcacaattttacagaatcaaaatatctggccatggggcccaggaatctgcattaaaacaaagcaaaataaaaaataaaacagaacttcccgggaattgtgattgatgctcaaccaacgtttgggaaccactcatttatttcattaacttcagggaccagtgccttaatctcctttgaaccttctccaagtcctgagagtgtactcttcctcccgtagttaatgatggtagcttttgaagtcttgagagtctttatcttgtgaacattgtacagattcagagacctagagcatctttcatgttgctattcttttccctcagtgctttcattatagacaccaatcgtttgcatatgttgtcctgggtcattttatttgggatccaaaaccagaaaatttcaaacaacaacaaaaaaatggattcttcgagaatgccctagccatggacaagcttctgcattacagagctcttgctattgtgttgctttgggtagcaatgcctgaaatctcagccaattttgggtcacagtaggcctatgtaaattatctaaaaatggattcattatggacattataaaaataaatctgacacctgagcctttgggcaaatataccatataaagaaatcataccctagaataacgattaacctaaagaacttaaaaaaaatcagtatgatatttttatcatcctttcttaaaattactgcattcagagagacctgatggctgaggacagcacctggggcagaggagtataggtcattgggatgtggcatcctgagtcttctagcagtttgctcttccagcactctcccttattatatgttctttacattgttctgtatgtcgctgtcttcaaacagaatagataagtctactagtcaagatagacatataacaggcaccacatgtgcataaaaattgcattatgtaaatttagtgccgtaatataatatgaaggatgtcctctaggaggaactggggaaagcatcacagacgaggacacatctgatctgagtgttggagaatgagttagttgtttaccaagcagaaaagggtggtggacagcatggcatgccaagtaaagggaacagcatgtgcaaaagcagagaatggcccccatcctgacccttgtaattttggcagctctttgctgatgtcctcaggcaatgcatctgggctcctgggaatagctttgcaatgtgaacagagtgacttcactatgggtagacctaaatgttctagcgtgctctgaaacttacctctagaaatagctccaggaagttaggtagcttcagagaggaaggaccaagaaatatgatcttataccacaggcaagaagtactttcctggaggtactggccagaagtactattgctatctctctgcacttgtctgttatattttagaatgaaatgtgcctgtgcatacaaatgctaaggcaagaaagaaaaagcaaaaggcaattctctttaaatctcctgaaataatttcaggcagctttttttacctagtcaaacacacacgcttaagaatggagttgtaagctaacttaatcattttttgttttgttttgctctcttacttgttcacacgttggggtaatcctgagaaaacaggaagcaatgaaagaaggattttattgtgaaatgttcattacaacttgtaattttaaaatgtgtttgtatgagtgtgcacaaatgtgaataaattttagagcactttctcacataatatctagtttaatcaccagaatatcctgcaacgttattatagttcctacattattatggttcctaaagacaaatgaaaaatctgtgattcagagacccaaggttaggctaataaatgtagaagtcacatttgaccaaattttagtatcttcccttaagtattggtaatgtacgataaacactatttggtaataatgaattattacaattactaaaacaacttatctggcagaacagtatcttaactatttgaaaaatattgtagtggatttattagcttccatttcatctgaagtccactttgctttactgcttactttatctttctagctactctgtaaaaaagttattatcaccctcaatctgccaagtataatgtatgtaaagtgaaataactagcatattgcaaagctgggaattgaacccttgtctcctaaatccaagtctgtagctgttcctcagcagtacactgtatctcatgttaatgccattattacttgtattaaatgaaataatttttccatcattattttcccgaattattactatccagagcgatttgaaggttaaggtcatccaaataatgtgtgaaaattgcttaaaatcaatctcctgtgcatggatgtctatgatgtatacaaatataaaacagccaaagtagtctcaagaagttattaccaagtttctcaaatagtgtctcaaggcgacattatttgacaagacctttggaataaccatttggaattttccttagttcagttgaattgtgtcatcttgcttaaacttttcagatatcaggggtagttttattgacattacaatggaattaaaatgacattttattttattttttaccgttctatagaaatggcattttaattcgtcattatttttattattgatctgttaatgttgtaatgacttgggttttagtaagggcatcctctgtaaaaattacctcctgggaaagaaatctccaagttctatgaggtctcccagaaatatcaccacttgaggtgagagtaaagtgtcatgaatgccacccaatgtgattcctggtagataagatttcactgttttatatcttgacatctgcattaaattccgttcttttactgggtcctattcacttccatcttgtgccattgttacttaaccaggctctgtagtggacaggaaaaagtaaaaacacgtcttagcccttaaacagtttatattttcattagaaattcaacatatgaaaatgcccagttaactaacaatataaagctttactgtacagcttctatttgtgaagtgactccatggctaactctatcagaagaaagagtttgcttggagccaaggtagtattggaaggttacagagaagaaagactcagggaggcagtggttaagcttgtagactctggcatcagatagatctgggtttcgagttttgattttacctcttaattctctggaaacttggactcaccaggataagtggcaacctaagttctttcagttttaaaatagagatagttatgcactaggcgtggtggctcacgcctgtaatcccagcactttgggaggccaagggtggatcacctgagatcaggagttcaagaccagtctggccaacatggcaaaaccccgactttactaaaaatacaaaaattagccgggcgtggtggcacacacctgtaatcccagctacttgggagactgaggcaggcgaatcacttgaacacagaaggtggaggttgctgtaagccactgcattccattccagcctaggcgtcagagtaagactccatctcaaataaatgaataaataaaaataataaataaatatatgaataaatgaaatagagatatttgtatcttaaagagttgttttcaaagttaagtcatgacaaaataatgacaaaatcagtggaagctgcaatcattgttcttgctattattattgaaatgaaaatatgaacattagctctgagggttctatccatagttttttttaaaaaattctgattataaaattttaattataaaatcccatatagctcatgctgaccatttaaaaaataatcttagttgtatccttgtttctttttgtatttgctaatagagattttagaattggcttggtgtatgtttgtccttgctagaattatgattccttttttgaatttgcattacacctttgttagaagtagaattactttacttgaactttgtcaatgtggcaaaaaatgattcatgtttatattatctctttgaaaagtagtgtttttactattgaactataagtacagttaaaatgtaaatgaacatttcagaaagaaactattgatttttattaattaaagaaattaattttccaaaatgtcagttgctacagagagattttagggattattaactacacaatctcagaaaaattaatttaattagggattttattttgggttccattcgtttttgagattcatattttggattaagccagtctcctgaaattgtatttaaacttagtctgcgtgtatgtcttttttagggaaagcattcacaacaccatcagaccctcgaagagattcttaacttacccattaagaaaagtaacatctctgtctaggggtcaccagtctctcaagccagttatattgttgctgcttgaataaacaaaacaggtttttatttctgctcttaccaacattactaggctgtgtttgtagcaaaaactgagtatgtggtggtggtagtaactacagtagaaagtgtaacgtgtacacaattatatcatgatacatggtttttaaacacattttatatatgtatatatttaatttattcacacaacaaatatttgcacatgttgcctgagctgtgcatgtgtaaggcagggcatagaaatgaatagggcatgggttctttctgctgaattagatggtaccccctcaccccccattttactgttgaagagagggaagcttggtggtgaggtggcttgccccagaccatacaggtaaaaagtagtccagagtagattcaggcataacttgtttgaaccaaattgtgttctttagactgcaacatgctttctgttccttagcatgtaactattaaccatgtatttttatttatttttcttttacgtgaatttaaaatgtcatatttgttctgcttctattactgcagtcttgaatgatgattcatcagtgcagtggcctattttagtgaaccacaatagcttgggtagaaagaaaaaagatccaacatacacaggaatggaaagcagccatctttttatagctaaaattgcaaacatctggcaattactctattctacctcccttcaaaaaagaagaatcatcccttcaactggagcctgccactgtgtttaatcaaggcagaaagcaagccttaaggagcaataggttttgattcaaggaggccattgcctaacctagttggccaaagtctcttcagaaaataccccatttagtgctccccataagctactgggttatataatgatagtaatggtaatatagcaattaataactgcagaaatccccttttgtttttctgctgtttcatttgtggtggctcttatggcagcttttatattgtgaaagttaattattttggtcagttttgcctgtctccatctgcttaagcttcttgtattccttaacaaaagattcaaccacatcgatacaaccaataattgccaacttgattttattataaacatgtccggtaaaatgctgaaggaacaaataaatttatttttaaagcctggccgtgatcttacagtcaaaaagtggtccaccaaggttatggctcctaagtaccccacccgtatttcttattgtgataattgtttgtgaaactagttcttccctcactggccaaagtcaacactgttggcaggggaagtgagaacagctggtggttcacagtatatgctgagaatcagaacttctgcatttttctcatggggctagtaccagcttttgctctggccttgaccaatgcacgtacctttctcttccccatttacctttctcttcctctaggtctctgaagagtagaggtggatctttcccttcccaggttgtgccaacattattaccaatgttcccttttgttgtagaatattttggtcagtaatcatcagtaatcgctaagtaacagaaaatcaaggttcgacagcacggttttcaaaaacaacctcaaatactataaatagtctgttttctagtgttagcagattatggtacatggaaatcataagcattcagtgggggcctttgagcttacattaaatgcctgccttttgcttttatgtctttgctagaactgtgttcaatacccaaagacacagctttttctttgatataataatttttctaggctgtctttcctgccagtcttcccaaaatcccagtgaagtttgcaaacacctcattaaactaaatgcagttttgggagagatgagattgtgactagggagttttctggtttttacaaaaagaatagaaaaagaaaaagaacaggaactcctaacaacctaaaatgcatgccttgtgcaatatagttatcccatgcagagctacatagtgtaacgatctctggaatctcaaatgaatgtgctcccttttctctgtcttcattcagttggatagttctggtcttcctccctcgtgtgcacatctttgaacttgaactactgtattacagccagtgttctaacctatatgcgtttctctttggtggccctgctaatatagaagaggttacgctaatgttccttaccatatttttctttttggtgtcttctttgtgtgtgtgtgtgtgtgtgtgtgtgtgtgtgtgtgtgtgtgtgttttaattgtactttaacttctaggatacatgtgcagaacgtgcaggtttgttacataggtatacacatgccatggtggtttgctgcacccatcaacccgtcatctacattaggtatttctcctaatgctatccctcccctaggcccccaccccctgacaggacatagtgtgtgatgtacccctccctgtgtccatgtgttctcactgttcagctcccacttatgagtgagaacatgtggtgtttggttttctgttcctgtgttagtttgctgagaatgatggtttccagcttcatccatgtccctgcaaaggacatgaactcatttttatggctgcatagtattccatggtgtatctgtgccacattttctttatccagtctatcattgttgggcatttggattggttccaaatctttgctattgtgaatagtgctgcaataaatatacgtgtacatgtgtcttcatagtagaatgatttataatcctttgggtgtatacccagtaatgggatcgctgggtcaaatggtatttcttgttctagatccttgaggaatcgccacactctcgtccacaatggttgaactaatttacactcccaccaacagtgtaaaagcattcttatttctctacatcctctccagcatctgttgtttcctgactttttaatgatcaccattctaactggcatgagatggtatctcactgtggttttgatttgcattgttctaatgaccagtgatgatgaggtttttttcatatgtttgttggccacataaatctcttgttttgagaagtttgttggccacataaatatccttcacatactttttgatggcattgtttgtttttttcttgaaaatttgtttaagttctttgtagaatctggatattagccctttgtcagatggatagattgcacgcttttttttcccattctgtaggtttcctgttcactctgatagatagttttttttgctgtgcagaagctctttagtttaattagatcccatttgtcaattttagcttttgttgccattgcttttggtgttttagtcataaagtctttgtccattcctatgtcctgaatggtattgcctaggttttcttctagggtttttatggttttaagtctcacatttaagtttttaattcatcttgagttgatttttgtataaggtgtaaggaaggggtccagtttcagttttctgcacatggctggccagttttccaaacagcatttattaaatagagaatctctccccattgcttgtttttgtcagatttgtcagagatcagatggttgtagatgtgcagtgttatttctgaggcctctgttctgtttcattggtctatatatctgttttggtaccagtaccatgctgttttggttactgtagccttgtagcatagtttgaagtcaggtagcatgatgcctccagctttgttctttttgcttaggattgttgggtctatatgggcttttttttggttccatgtgaaatttaaactagttttttctacttctgtgaagaatgtcaatgctagcttgatggggatagcattgaatctgtaaattactttgggcagtatggccattttcatgatattgattcttatccatgagcatggaatggttttccatttgtttgtgtcctctcttatttccttgagtagtggtttgtagttctccatgaaagggtcattcacatcccttgtaagtcgtattcctaggtattttattttctttatagcaattgtgaatgggagttcactcatgattcagctctctatcattggtttataggaatgcttgtgatttttgtacattgattttgtatcctgagactttgctgaagttgcttatcagcttaaggagattttgggttgagattttgggattttctaaatatgcaatcatgtcatctgcaaacagagacaatttgacttcccctcttcctatttgaatattctctatttctttttgttgcctgattgccctgaccagaacttccaatactatgttgaataggagtggtgagagagggcatccttgtcttgtgctggttttcaaagggaaagctttcagcttttgcccatttagtatgatattggctgtgggtttgtcataaatagctcttattattttgaggtatgttccatcaatacctagtttattgagagtttttagcatgaggtggtgttgaattttgttgaaggacttttctgcatctattgagataatagtgtgatttttgtcattggttctgtttatgtgatgcattatgtttattgatttgtgtatgttgaatcagccttgcatcccagggatgaagctgactttttcatagtggataagctttttgatgtgctgcaggattcggttttccagtatttttattgaggattttcacaatgatgttcatcagggatattggcctgaaattttcttttttttgttgtgtctctgccaggttttggtagcaggatgatgctggcctcataaaatgagttagggaggagtccctctttttctattgtttggaataatttcagaaggaatggtagcaagctcctctttgtacctctcttagaatttggctgttaatctttctggtcctgggctttttttggtcagtaggctattaattactgcatcaatttcagaacttgttattggtctattcagggatttgaattcttcctggtttagtcttgggagagtctatgtgtcgcagaatttatccatttcttctagattttctactttatttgcatataggtgtttatggtattatttattggtagtttgtatttctgtgggatcattggtgatatcccctttatcattttttattgtgtctatttgattcttctctcttttcttctttattagcctggctagtggtctatctattttgttaatcttttcaaaacaccagctcctggattcatcgattgttttgaagggtttttctcatgtctctatctcctccagttctgctcttatcttagttatttcttgtcttctgctagcttttgaatttgtttgctcttgcttctctagttcttttaattgcaacgttagggtgtcgatttgagatctttcccgctttctcttgtgggtatttagtgctataaattcccctctaaacactgctttagctgtgtcccagaaattgtgacatgttgtgtctttattctgattggtttcaaagaacttatttatttctgccttcattttgttatttacccagtagtcattcaggagcaggttgttcagtttccatgcagttgttcggttttgagtgagtttctgaatcctgagttctaatttgattgcactgtagactgagaaactgtttgttatgatttctgttcttttgcattttctgaggagtgttttacttccaattatgtggtcaattttaaaataaatgtgatgtggttcttagaagaatatatattttgttgatttggggtggagagttctgtagatgtctattaggtctgcttggtctagagctgagttgaagtccttgatatccttgttaaccttctgtctcgttgatctgtctaatattgacagtggggtgttaaagtctccaactattattatgtaggagtcttagtctctttgtaggtctctaagaacttgctttatggatctgggtgctcctgtattgggtgcatatatatttagggtagttagccctttttgttgcgttgctccctttaccattatataatggccttctttgtcttttttatctttgttggtttaatgtctgttttatcagagactaggattgcaacccctgcttttttttgctttccgtttgcttggtaaatattcctcgatccatttattttgagcctgtatgtgtctttgcatgtgagatggatctcttgaatacagcacactgatgggtcttgacgctttatccagtttgccagtctgtgtcttttaactggggcctttagcctgtttacattgaaggttaatattgttatgtgtgaattttttcctgtctatgatgctagctggttattttccctgttagttgatgcagtttcttcatggtgtcgatggtctttacaatgcgctatgtttttgcagtggctagtactgtactagttgttcctccatgtttagtgcttccttcaggagctcttgtaaagcaggccttgtgttgagaaaacctctcagtgtttacttatatgtaaaggattttatttcttcttcacttatgaagcttagtttggctggatatgaaattctgggttgaaaatgcttttctttatcaatgttgaatattggcccccattctcttctggcttgtagagtttctgcagagagatctgctgttagtctgatgaggttccctttgtaggtaacctgacctttttctctggctgcccttaacattttttccttcatttcaaccttggtggggtaacccaatctttctctctggctgcccttaacattttttccttcatttcaaccttggtgaatctgacaattatgtatcttggggttgctcttctcgaggagtatctttttggtgttctctgtatttcctgaatttgaatgttggcctgtcttcctgggttgggaaagttctcctttctttcagagatgccctgcccagagaggaggaatctatagcggcagtctgtctacagtgcctttgtggcactgtggtgggctttgtcctgttctaacttcctgggggctttgtttacactgtgatgggaaaaccacctactgaagcctcagtaatggtggacgcccctccccccaccaagctggagcatcccaggtcaacttcagactgctgtgctggcagtgagaatctcaagccagtggatcttagcttgctgggctctgtgggggtggggtccactgagttagaacacttggctccctggcttcagtcccctttccaggggagtgaacggttctgtctccctggcattccaggagccactggggtatgaaaaaacaaagtcctgcagctagctcggtgtctgcccaaacggtcacccggttttgtgcttgaaacccagggccctggtggtgtaggcacccaagggaatctcctggtctgtgggttgcaaagaccatgggaaaagggtagtatctgggccagagtgcaccgtttgtcatggcacagtctctcatggcttctcttggctaggagagggaattccctgaccccttgtgcttccagagtgaggtgatgctccaccctgcttagactcaacctctgtgggctgcacccactgtctaaccagtcccagtgagataagctgagtacttcagttggaaatgcagaaatcacccaccttctgagttgatctctctgggagctgcagactggagctgttcctatttggccatcttcatcctaagtcccatatttttcttttactttgggacttggaatctacaaatgttccggaatacagacagtattgtattgcagtggactttacatgtttatagtggttctctatcctcttaacactggtaataatcacctggggaacttcaaaaaatttccagtcttgggtctcaccctcaagtattgtaatgtaattgctctgggatgggcactatatatatatatatattttttttttttaacactatccatttttagaactgctaaggtaggccaatctctcactgatgcttgaattcatataatcactgtcaaggtgtttttcaggcttatattgagtatttctagtgcaggaaactgaaagaacgctttctgtcttaaggaagttctgattttttgagagatcagatttattattatttaaattctgccttcataacatgagattatcttttagtcttataaatttataatttctagccatggagtttagttagtacttaaaattgtaactacctgcccttcaaaaaaacaaaaacaaaacaagaacaacctgatcacgtctttataattgtgactcaatcctcatcagataggacctttctgttcttcacttttgagttataaatcctagggaaaggaacaatgaggaacaattagacaaagaaataaaataagtactttctatagtgagacagcactagagttaccttgttaactagactgagagctggaactctaagcctttcatcattatattgacaatgtgtaacgtatggttaagttacagaagaaacattacattattattattgaataagtaataattatgagttttattaagagggcccagttcaatttatatgtgcaaaactgatgcccttaattgtaacaatactttagaaatgatagtggaagtaagttccttttgcagagaaaatgcaccttaaaatgcctaggcacaaatttaatgagatacattgttctatatcccaataaaaacaaagacaaagccaaagtaatgacctcaaactctctagaaggacacgaggcttaatggtaacagtccctgatgcaggtgggtcctcttaggcaatcttaggtttgcattggccttactatatggtgaaagtgagcatatgttttatttatgcatcatccattttactttagattgaaagtatttccccatgttttggtaaaacctgctgctcctgaaacctacctttgttcctagtcctgcccttataaattgcaaaaaacaaagccaattcatcttgcttatatgagcccgtcttccctttcataatagagatatgtccttcattctgactcgtcttcttttctttaagcggaatagttccactgcagagtctcttaattatttaatgtagtacatccggaaagacctcatttgtaaggaccaagaactgaaaatattgctattgaatgcagaaagggaatggtaaggttctctcagagaattccttttcctaaacaaaggtgcaattgccaggaagcaccttcacatttttctacaccatgtcaggcttccttatagcactgttatatgtggccgtattatggttgacattaaaaaatgtgtgtatttttgaaagaactacttcctttattttaaatagaaaagaacacagcatctctgagagtgagaagatcaaaaataagttaaaagcttttcttgtgattagattaaccagattgattaggacaaatagggtttatctatagcttaataaataagttattatttcctcaaaatttagacttactaggcctaaaggagcatagaggtctttagacttaataagtctaaattttgaggaaataagttggaaaaactagagttcagaatgagtaatagtaaaggcaaaactaagattattaagaaaattatcagaatttcctatgtgatttttttaacaactttccctggcttatattgtacatgggtttaagttatcttacagctctttaattatttttaaaagtaggatagcatgttatcttccttctctctgtctataccaagtgtttgttatttgagcattacagttacacaccaccactatctggttgtaccgtgactgaaatatcagttaattggaaaagtgaaaaaaactctttaaactcaacctatacaattaagatgatgaagtggcagcaatcattgcactcttttacttacctgtgtgatttgttataccatgtgtttgtttagaatgtaaataatgtgcagttagagtaatagatgcagatgactgaacatccttagacatctggagaagcagcactggcaagattatctctgaaaatttctgaaaatctttttgttgcaacctgagaaggcatagacataactgaaagcccaatagtaaggccaagttcagtaaagttgaaaatgctttacaccatcactgatgatgttgagtcttccccacccagctcaacattgagattttttttttatatgtagaagttatttgttccagaatttttcctttaattcattgaattattacataattaactttttttttctttaggatttcttggctctcaaatacttttactctttttagagtgctacagccacagttttcttaaatatagggatttttgaggtatcatattttgctaatggtaagtttatagtattcctaagcagcttatctcatacagttttctctatattgaatatgattcagatgaaaattaacctgcgtgaaatggttgtcatctggaatgactgccttttaccctagaaaacagccagcccaaggttgagaacacatctgagaaactgtgcctattttgagaactaccaagaaatttttattcactggaacagctgccaggaaacttgttggtcatagaccagtgccttagttgggcatttttttcagaagtagagaaaggcaaagctagagtcaccgagggattggaaggatgaaagacgtgtagttgaaagctgggcaccatggaagaccgaaacactcttcaaacattctgttttcaagaataaacccaaccctaggagcacgagacagagtataaagagccatgatttttagcgaagacctcgcatttatcttaaaatttgattttgttgtgaatataatctcagaattatgcagggatggtccatcaaaaaggtctgccagagtcaagctgagtttatcttagccatgctgaaaagtaggtggcagtcaatcaaaatggcaattactgtacaagacaagagttcactggagggaagggtgaatggaaaggacactccctgcattcttgaggcctatgtaaatcaacaaatgactctgggttagtttccacaattgtaaaacaatgtgattgaacaatattgtttcttcacttccttcctgctctaagattgtacaaaagtatgattcaactacagatattgcataaaattggttactcctgaagtgcatggagtaaaattgttcccatagaatatcgtgaatttagttaggttgtgacatgggtcatagtctccgcagtctgtacgccctcagtatattcctctgacaaccccatgtcctttcattctaagctaatatccttacacatctttttctctacacctgagcaaaatatacattcatgttcttaagtgcatgtagttaagaggaagctaacacttaatttgttcctgctgtatgccgggtatctggtatgtcatcttcatagcattatttgaagtttggtactaatatttccatttttcaagtgatgaaattaaggctcagagagatagtaagttgcccaaggcatcatgacttacaaagaatggatcttagatttgaacacaaatatctctaaatccaaacttcatgatttttctactgtatttcatttgctcacttccaaagtctatacaaaaatatttgttaaatgtgcatgtactgagctaccgatatctactatatctgtgtatacagcgatagctatcaaaaggagagacgtcctctaaatctttgataaaagtatgtcaaaatggaaccctcccagaaggacttcatttttaatagaaatcagagtattagctgaaggcacgaagttctaagataaaaatgtagctatgaatcagggtggattcagagaggtctttgtgtgtatgctataggtgatcatgtgtgaatttgacctacggcaagaagaattttttttttttttaaagctcttccaggttatccttgtgttggggaggaggatagaataaagaaatgaatgtcttgctggttcttccaagttgtatgaggataatatcacccagggatgatatgctagataaagacccaggatctttattactttttgacatttagttttgttgttgttgcttaaatttctagtctgttttgatggcattagaacctttaaaaggagcttgtaaccttttctttttacttttcctgaaatgtgtggatgggaggattggacaagagcctcaagggatgggaagaagagctcagtgcgaacacacatgcatttattcatttagcaaacatccattaagtgcctaggacctttaaggtattctgccaagagctgtgcaggataggaatgaacaagggatgacctttgctttggctatgtacaccagaaaaacgagcaggggctggaggactcttgccaagaagctatttagtggttctcttagagccttatctctatctaggctggagattaactcagaacatttttttagtctgtttacctctaaaatgaaaagaaatatatattaagaataaggaggtggcgtggagctttcactgaatgtatttcaactggagtattgaacgttatagtgatggatacagttaatccatcacaaccaccatttcaaaggaaagtggggaaatcctttgtccctgtgtgaaaaataacttaggaaattttggtctgacagttgtgagagggttaagaaagtcaatcattttgtaaccaggcacagcaatcttgtatgaaccatgtcaggatgttgtctgcatgccgtctttgctgatcacagtaatcgggtcataagagaaagggaagtaatagagtgtctcttagcaaccaaccccaggaaaaagaaaattactcaaacccagccatccagccagagaagtagaaagaaaaaaatattctgatagtttgctgaaagagctcagggatgagagagagagaaagagagagagacagaaagtgagagagagagagagagagagagagagaggagaaaggagagagagaaggagggagagagaggaaagggagaaagaggagaaaataggaaggagagagagagatgatggagaagagaggccagagagaaagaggaaggtatggagagacaggagggagagagagagagaaggaaaagaaggaaggaaaaaagcagaaagaagtaaacaaaaaactgaaaccttttatttctttgttttcctttctcttggtgttatctttttttaaaatttttatttcagaaagagagaaagaggcaaagagtgggtgaggacaaaagaaaccctgtctcctaaaacaggaacttgatagtccacatcgtgagagaaagtggggagggtgaatggtagtataacttcatcgtgtcccatgtttctcatggtttccagttgcgatctggattactgttgagaagtaataggaagacgaagtctacagatgctgtgattagtgttctaagacctgtttttgaattctctgcttgttaatcgtgtagcagtcagttctacagcttactgcagtctttatagtaatgactttcgaactttgttttttctgacataaatagtggtaagaaacacatagtacattgacaagagcgtatatatgtacatgtcaatgtaatatatattgtcaatgtaatattatgctaagtgaaattttcatatatagatatatatattttttcatatataggctctttatgtgatgcatactaatgttttctattcaatttcattacaaaaattcttttggatacctgctgaattgattgtatgaccctaatgagttacattcttccatttgaaaacaccagtctaggatcagcacttgccttacattttgattttactagagtggtgccaggcagcaagttcagtcttggtgaagagtctttggccagcactgtgatgttcagaataacagctatttaagctaaatattttcttgtcatctgccaagtagatgtatcctaagagtctgtcctggtttggaatttaaggggataaacctgaggcaattccccctggactatcttcagtttagaaaagtgccacagtgtgttcaagaagcaccggactggactcaggagacttggttgcgcttgatggcatccttttctcactctgagcctggggtcaatgatggatcgaattagatgatgtcataaattccttctggctgtaacatcttggaatttatagctggatggggctccagaaaccatcctgtctaatgtctttgtttccaagatttagttcttgaaaaggaatgatagacttcctactttctttaaagatctgtgctaggaacaagtatacatgaaagactgaagcttagtacataacttcaaacatctcagtgtggtataggagtataccatgcgcacatataaacataattcgaagaaaatatataatttgttaaacactacaggtagggtagaagtaaaatataaaaactcagaaaaatgataatttaatcttactgggaagaatgtctgaatgctacactagtatataaggaggaaggctttgctgtggactttgagggaaggaaaatattgataataataggatgttccgggtagattaaatgttgtagggaatcaaagaatggagtcttaattgtctcctttgagttctgttttttgacctcattgaactcacaagggtttactttttaccactaaatattcctattattttatagctgttttttcttccaatttaacatgactttttaataatgatccattgcccacatttagtgataaggtgaggtttgattaaatagtatttgtacagtactacctcctacttggagacacacgtttatataaacacaaggtgttatataatttgtttctctgttggggggagggggaaagtaaataaggaaatataaattaatacctgttttcttttcaggataaataatatctgaatatgtttctttttctttcttttttcttaatgcaggctttatttagtttgattttacctttagaaatttataaaccatggaaataccccacatttttggggatattggaaataatctctgtgatgtcactttctgaatcagactaaggtttgtttattacatcagttacaggaaataagtgcataaacctgaattaatctgaggatgttgtgtttgtaatgttgcttccattttgtccctttccttgaagcttgaggcacttgcacatctcactcagtcttccttttctctacagctttcctgctgtcctaaagagacaaaaggcatatggctttctccagctgcatttcctgacctgtttccttgccatagatcgcttctaaagcaacattcccaccatttgaacttccattcttcctctgtcccaaacctaatattaacaataacaggagccaatgcaatttttcattataatatggtgttttacattcatagcacacacattactttatttgatccttggaactcgtggatatgtaaatggcaagagttactcttccattgtgtagattactaaaatgaaatatctagaggtaatgtcacctagtaccactgactatagtgttgtgataccaataccagaataacagggctcctgacttctgacccaagggagataaggtggatcatcttaaggttatggctgatatataattgacgttatcagttttagtaaattttattttacacgaagaaactgaggctaaaagaaacggagccactagtgcttagggtgtcaacatcagaatcagatctttgattcccagatttaacatttcctagattctgtgttctaatcatctcaatggacagtgcagatattacttgagaaacatgtttgcatttcgtgaacaactcctgtttattttcaacattttctatgtataaataatgtttgtgtaagcatatatttacttaggacccgatatctgttcagtactgttaattgccttgggagaaaacaaaagcaaaaatgtaaggcctgggatttctatgcaaaaggccaaaaagggcttttggtgagattttaaaaatagaaaaccaattagaaaataattaggtgtatagtggtaggcccagacttgaatttcagtatgaattttgaaaaagaatatatattttaaggcctacaagggcaaaagtagatgggctttaaagtttgtgtaggtaagattgtctgtgggtgaagatgggtagtgggatggtgagcaggcagagtggggttggggtgtggggtggcacggccagctttaatggagacaggcgacttcgatggggggtaggacatgaggtgcacagagcaacagttttcagaggtgcagtagggatgatccaggggatcagagaggaaaagagtaaagactctgccaacctttcagcctggagcctagagccacagtgtgagttaaagatgtaaattccttggaattaagaaccataccttatttagccatttatacagctgcttaccatggtaataattagaaattaagatgatgatcttttatgtgagcaactttcctaaataacacttgatgctgctgataaatgagacttaggtacagtgctttttctgtaggattcaggcctaaatggatctaggaggatactagagcttccgttccaaagtacgtgcatttgaatgatatgctaagtaatgccttgtgtatccttcaacaggaaaagttcctgctattaggataatttgatatgcacttgatgtttgctaatatgtttcaatcacataaatccttcttggatatttttgttctttgtggacttcaggtaagtttaaagatattccacacacttaaatatgtacacaaatgactttataacaagaaagcaaatttgtttaaaaaacaaacctacaattctgtctctctaacacatcaactccattttctctgtactcttttagtctttgccaatatatgtttatagttttcataatatgtaactaaagatagacataattttgcatttttttcacttaatactacagaataagaattccccaccatcatatttagcaatggcattatagttcttgaagtaagcatcccagaatttattgaactattgccatattactggtcgtttgtgttatttcactgctttaagtgtttttatgttagagaacataatgaaggtcttcatgggtatagctttttgagaagctagacatgttgaagaaattgggagcatgctattactagcttctatgaattggtatttactatgtatccctttaattaaattccattctgcagtaagtgtgatagctttgccgaagcacttgggggccaaaaggacatttgtaactggttaagttggaagatatttatttgtataaggtgggtagggacaggatggacaggctatttttcttggccacactcactgaatttaaataggcaatggagataaatcagttgtggcccaactagactgcctggatataatatccttttggactggatcatgtcgtttcattgcagtcaggatggctaagcatggtgatggatcataactgaccaaacagacaggttggttagaatgtatgaccagtcatagctgtgtaactgaggaactgattatattcctgtgactaatgaaaaagcccaatcttagagtagctgtggtaattataatgagaatactagtaaaacattttaaggtgttgtgttccagacactattccatgcattacacacacacacacacacacacacacacacacacacacacacacacagtctcatttaatcctcataatattatgaggtagtgctattattaatatccattttctggatgaggaaactgaggccccaaccagtgaaataacttgctttgagtcccatattaagtagtactacccaggcaacctggccccagagcttacttacacgtgtagtaactacactgttcttcccatttatgaggtgattaaactatggaggcaggcatggcatacctgcagaacaggactagaatctcataggtttttgaacttattaggcagacctaaggttttttacacttcctgaggctatagaacagaactaatctcttagccttaatgtcactataacgtaaaaaccacgtgaagagaattacgatggtgagcagaggataggacacttattatagttgttacctcatttatttaattctttgtttcttagagaataagattctggtacatagcaggttcccattaaatacctattgatttaaagtttaaaacaaggaataatggctaaatgaatcattgaatgcatatgtctatttcttggaggtctaatcatgttttcaaaactttggctcaactgtagttagtgcagagtatgtatggtcattctgctagagcaaaatcttagtataggattaaagaactctgcaaattgttaaaacatgcaggtacactagtttcaaaatgtattagtttgatttattattgtcattttctgataaagaaaggggagtagtctcccctaaagtttggtgattaagtcaccagccaccttttctattttggttgttgtggtaattggtgtttcctggaaattttccctctgttctattaataatgttaaagggggttacagccgtgactcactccaggaagtcaaccatcattcgcttcctcaatctcaccaaccagtccccatgtacaaaatcagcgacttctgcaaatgagttactttacagctctcaagagagttctagaaaatacagcttttgtatttcgctgtgtgcttcctgccttggcagagagtaaaacaaaccttcatgttttgctccttggtagtctcgagataattgaccagttaggtaactagtgtagtctcactcaagagaaatcccacttgctgtctaacaaaagtcccttggcactcagatttgcaaagttaaacctggggacagttcatgaagtccagtggagtctatacttcttttatacctggctttatgtttctgtattcattattttgctcaatgtttaattaagtaatgaatattttaacttgttcaacatataactccgtatgtcttagcactgctgtgtagtagataccatcataggcactgaggatgcagtacagacatggtagctgcccttgggaaccttctatcctagttattgttcactatattaccaagttaaccacagggaaaacaagttcagagaatacataggctgtgggcctgtcctaaaggaatcaatctgtaaccgacatgtctaaagttgtgcaggataggattattccacttaattctgtaatttgttttgtctggaatttatctcatctatgcccccaccctcactcatacacataaacatggagatggaacttaactgtgcattctcgtggtacttaaatttttgtaccttggattatcaaaatttttgttcatgtcctagcttctctgcaagttctttggttaaaaccagtgtgtgacacatctctggatcagaaatgtcttcctttctacctttcaccttccccaaccttcctggtctcctagcacagtgccagatgaatgacagctgtttagtatgtttggtaaatgctaactgtgtgtgatcttagaaaagttagtgaactttgctgattttcagtgtcctctttcgtaaaaaagagaataataaccatttctacttcctaggttgttgtcaaggttaagtattatatttaaagtttttttttagtagtgactagcacttagtaagcacttactgaatgttatcattaataaatgatcttacaaagcagtagcatttccttctaggatttttttgtagtccttcatgattgatagagaagagacatgcagtctaggatttcacatcagctttttaaatataggaaaccagatgtaaatatgctgcttcggttatttacatctgacattcttgcatgcttgctgacaaaacattaagtaaaaattatgctactctttcccttagatgtcaattcatggtcacattaaagtcacaagatttttcctgaaacttactgctggtaccaattttaccataggttatcttaattagtatcatcacacagtggtgcagtttgacctttggggtttgattccagtcctttgtttattctgactgtgaatggaggagtcaggcagaatgacctttacatatctttacctccttctcccatcttctgctggcatagaaaactttgcataaagaaaggcaacagagcaactgcaaaattgctgggattaaaaagaaaattgtatgataatgagaaatccagtgtactctctctcccttaatatgtgtgtgtgtgtgtgtgtgtgcgcctgtatacatcagatatatggattgatgcagtgtactctctctcccttaatatgtgtgtgtgtgtgtgtgtgcgtgcctgtatacatcagatatatggattgatttctttttgtttataaaaaatattcacttttcaaaatgtatttatactatgctatcattgaattcttacatatcaaccctttgtggttgacactgcagagatgatgagctccattttataaagatggggcagttttatctcaacaactagtgtgttctagatcaaggactgattccagattctcaaagtcctacaacagtaatcttcaccatgctgtgtgtatgcgtgcgtatgtgtttatcagaatatattagaagataatttgcaagcagggattggttaaagttgaatgtttatgtattcttttgtagtgttgcttacgttttaaataaaaataaaactgcagtggatgtgcatttgtcatcatttagaggccttcagaccccaattcgtagtttcttcacagttgcctctattttctgattactagtccctggaaggtacagtgtcagagttgaagggatgttctcaaatccccctaaagttttccattgcaatactcattacagtttctttttttcttttcttttctttttttttttttttttttttttttttttgagatggagtctcgctctgtcgcccaggctggagtgcagtggtgtgatctcggctcactgcaagctctgcctcccaggttcacgccattctcccacctcagcctcctgagtagttggtactacaggcgcccgccaccacgcccggctaattttgtttttgtatttttagtagagacggggtttcaccgtgttagccaggatggtctccatctcctgacctcatgatccgcccacctcggcctcccaagtgctgggattacaggcgtgagccaccgcgcccggccgcaatactcattacagtttctaattgcgtatgtgtgtaaaagaacatataacttcctcacagactcagctgtacactctacaggggcatcattgtatcttaggggtctagcctaatggctggtgggcactaggtgcttagcaataactattgaatgaatgaatgaaaaaatgaataagtgaattcaacacaacttttatttatttatttttattattatactttaagttctagggtacatgtgcacaacgtgcaggtttgttacataggtatacatgtgccatgttggtttgctgcacccatcaactcgtcatttacgttaggtatttctcctaacgctatccctcccccagccccacacaccccaagaggccctggtgtgtgatgttcccttccccgtgtccgtgtgttctcattgttcaactcccacttgtgagtgagaacatgcggtcaacataacttttaaaatccagaatgtcagtactaaaaggagccttttaagtattagaattcaacttaatgaaatgttgctacgtattttctctgttctcatcactgacgtagctgctttggagcatctatatctgatatttagatagtggatggcttcttgcaaacacttacattgctcacgtagtaatgtgaaccaacagattggtggcccgggcagcaacatattttctataatctgtagcatgaagccaactgaggtgtgaccgtggtatttcctgaagtggctttcttttgcttttctgttttgattattatgtggctgtggatttagttcacaccatcactgtgaagaattttcgaaacttaagaatcaagctctgtttatacattttcaacgtaagcccttaattacagtcactcctcgggcccagtgattttacagttacatgtcagattgaggggtttcgtcttgagaatgtcagctggctctgtgaagaagaagaagagcagatacgtgagttacccagaggagtgctgattgagtccaggagtctttctgtttaagagcacgttgaaagagtttgtgtgtctatttgtaaaaccattttggagatgataaaaagcattctgagacacacaaattttttttctgttttcaaaggcaagacagagacatgtggacaggttgatgaagggatcattgtgatcttttctctcagaacttgattttcattacttgaactttgtcttctatgcttttattaccaacacctgtacacaaaggtacacataatacttgcaaaaaagagaagaaactgttttcagactggggctctattaagtgttcattgaccacaatctacaacaacaaaaatgacaattcctgcttgccattgaaaataatgcaattgaaaagaaagggcggaagcaagttcttggctgcatagcttcagtctgatgccatattctagagtgaaaaggtattggcttggttttgaggcctgccttcatcacgtgaaggctctgtggcctggcagggttatcttacgctattgaacctcagtttctccatttatccaatagagatggaaagtattggcctgcatttatttctccttcaaatgacatattgtatagaagcgtatcgtaagttgtaggtacttaacaaacatgaaggactgttatgatctcactttctgggctaaggagaaaatggtgggatgagtttcatgtccttttctttgtggttttgactccagcagcttccaaacgacttttgctgatgtttcctaattagcaatgctgaatctcgtgttgtatcaatcctccccattccttaagatggaaacaagtgttccagttatagctataccatgtgcctgacaggaaagaattgggttgccatcagaaccttaatttatcaatctcagtggcttaaaattttgaatttgcagcttaatattattcattaacaaagtatttttcatcccttagctttcctccagggaacaaaaggaaatggtacacactagctcttctaacaggctctcattcaataaaggatggtgtgcccttaattttgttagcatgtgtataaagaatgtacttttagtggacatgcttcactttgcaaatatagtgcataattttcaaatacatctttgactcttcctcaaacctgctcagaagctgtgtttttcctctcttcattaaaatgttccaacctggaaattttctctttacaattcagatatttttcacttcttgggaagggaataactaaataatttcaatactttaaactacaaggatgatgtatttttgttctacacagcattgatatggtggagctgtattctttttctaataatacaaataatatagggctgtaagggtttgtatcattgcatgtatatgttaagaggataagaggtatgtataaaagtaaattttgagaaattataagtataaaccaaaaagtcttatacctttagcaatgcctttaaatcttgaacttgaaagaaaaagttatgcccgactcgttgattgcatattaaataggaaaatacatttgttatacttgaactagattgttcttaggattttgtgaaagaaaatatataagcatgaatttattatagaaaataaaaatgaccctagaagaaaacctaggcaataccatttaggacataggcatgggcaaagacttcatgactaaaacaccaaaagcaatgccaacaaaagccaaaattgacaaatgggatctaattaaactaaagagcttctacacagcaaaagaaactatcatcagagtgaacaggcagcctacagaatgggagaaaatttttgcaatctgtccatctgagaaagggctaatatccagaatctacaaagaacttaaacaaatgtacaagaaaaaaacaaacaactccatcaaaaagtgggcaaaggatatgaacaggcacttctcagaagaagacatttatgtggccaaccaaaatatggaaaaaaaacctcactatcactggtcattagagcaatgcaaatcaaaaccacaatgagataccatctcacgccagttaaagtggtgatcattaaaatgtcaggaaacaacagatgctggagaggatgtggagaaataagaatgcttttacactgttggtgggagtgtaaattagttcaaccattgtagaagacagtctggtcattcctcaaggatctacaaccagaaataccatttgacccaacaatcccattactggatgtatacccaaacgattataaatcattccactataaagacacatgcacacacatatgtttattgtggcactgttcacaatagcaaagaattggaaccaacccaaatgcccatcaatggtagactggataaagaaaatgtggcacatatgcaccatggaatactatgcagccataaaaaaggatgagttcatgtcctttgcagggacatggatgaagctggaaaccatcattctcagcaaactgacacaggaacagaaaaccaaacaccgtatgttctcactcataattgggagttgaagaatgagaacacatggacacagggagggtaacatcacacaccggggcctgttgggcagtgggagactagggagggatagcattaggagaaatacctaatgtagatgacaggttgacggatgcagcaaaccaccgtggcatatgtatacctatgtaacaaacctgcacgttctgcacatgtatcccagaacttaaagtataatttaaaaaaaaaaagtaaaaaagacattgattcattcattcatttattcaggcaatgtttggaactcatgatgtgccaggcactgttttaggaccaggaataagcaatgaccaaagtatttgctctcctgatagattataaacaaataaatatataatagctcaagctgtgaaagtcacaggcacacagagacacacacatctccaacatatgcagcaaggtaatgagataaagaattcctggccattttttgtgatacaggatagatgtaatggtttcctatcagttttatcatttttaaggtctctcttcttagaataaattattttatttgtttcttccgtatgccatttaacagggaggggaagttttctgccagttttgcacccactgtttttctttttcagtaagagccttctcatagtctgcttgaaggcagcggtcttgccacatgtgttctatgcataataatttcaggagagtcttgtccacaatgcttggttgattacggcttgtgggacaccacttaaatgactagaaacagctctctttaataaacacactggtgttgtccatcattttaagtgagcatgagagcccagcttcattttgccactccaatctcacacggcctagaagaactagtgaaagtagcaggtggtgtttgactttcagtttttctgaaatgtgtctctttctgccactctccagacgccgtgccagtcaggccctcaaggtcaaaacatcatgaaattgaccatagattatctcagccttttctttttaaaagtgtcattgtaacctgttggttactgtgtatgtcatttaacttctctgtctttagtttctgaagtaactggttttacattgccatcaaaaggcttctgtgggtttttatttttctttgtttttatttgtttgtaaacaatctccttttctaaactcatttccccaaatttccttaatttttcacggactgatgaaaatgttttgctgcttccagagcttgtcagcttctctttgtggcattgctttcattgttgttctccaagttcccactcagctcctgctttcttcaaaaaaccctttggtttctaacatctatgttttcaacatggcaatggagtgagttgcccagggaatgattggaccgtgattgttttcatggctttcttttgccttttctccatgtcctttttagctctaagcctcatttgtaagctttctagaaatgtggattctattatagaacttctgtttttctcatttttgtagttgctttctcaagagcaggtgctggtgaccacaggacgagtgagagacgagatggtgtctctcctttagcagttggcttaattaaggaggttttttgaagtgtatgggcttcaaaaagtctgacatgtgatttgtggcctgtgtggtctaactctgattcctttggatacagaaccttagaaagccttgagaaaaacctcagagatcatctatgcaatcaattctggctttacctggagggagttttataaaacacaaatgccagggcttcaacttgagagactctgatttcattgttttgcagtgggtctgcacatcagtagtttatagaaatttcccacatgattttgtgaaaccagggttgagaatcacttgattttacagggcatatataaggtccaaagcaaaagtgactcttggctgggcgtggtggctcacgcctgtaatcccagcactttgggaggccgaggtgggaggatcatgaggtcaggagatcgagaccagcctgcccaacatggtgaaaccccgtctctactaaaaatacaaaaattagtcaggcatggtggcaggtgcctgtaatcccaactactcaagaagctgaggcaggagaattacttgaatccaggaggcagaggttgcagtgagcagagattacaccatagcagtccagcctgggcgacagagtgagactgcctcaaaaaaaaaaaaaaaaaaaaaaaattaacctgtcatggtggcatgtaatcccagctactccagaggctgatgcaggagaatcacttaaaacccgggaagtggaggttgcagtgagccgagatcgcgccattgcactccagcctgggcgacacagcaagactccatcttagaagaaaaaaaaaaggtgactctccgggattctatagcagtatggccatagagtagggacaagaacatatgcctcctcatttaccatcagtgctatttctattttgtttactaccatttactctcatttgattgtgtcaaattatctactgttgtactggggggccagagtggattcccaagcctcaaccacatagaagagtagattggaggttgttttcaaactattcaacattatcagtgggttgaatttgtaagctatcaactcaaaatataaagataatttttataacagggtctatattggattgtaaaaagagggtcataggatttggatctttagggctctgtaattcaaaatttgggatgttcattaggactatttgtgttatgttgtaaaacaattgtacttgttggcagacgtcttgggttcaagttatgattttgcatttaggaggtttgggaacgtggacaaactcccttttgagttttccttcaccccgtctttgtaatggagataatattctcatttccctgggtttttaggaaggttacctgagatgactcgtgcaaaagctaacacataatagataataatatctatctatattgagatatctatatttagataaagatatctatatttagataaagatatctatatttagatatctatatttagataaagatctatatttagatatctttatctaaatatctatctaaataaatgttaatttattctgaagtgtggtaagtttatctaacatttactgtagcaaccaaggtggggctaaatatggggaccaatcagaaagacgatctctgtcagttttgcctaggacgttcagtgggacttgggtaggagactgtggactaatctcacctctggaaatttgtgtggcctgtgctataactgagaggaaccaagtaagcctgtgtatatggcaaatggtagtcctctcccaaacaacatttgtaaagaaaatgcattttgcactatttcttagtgtgtctgaggctttttatgttcataaaaatcttagtgagttgttgaaacgtgcttttctgaaaaaccttggaatttacctggtttagaattagaatcagaaatgtgtctttttaaactgtattctaccttcttaaatcttttgccttctgcagcaacatggagcaactctgatacttttttctacttgagggcctttcgtagtcagagattatactaagatagcaaaaaatagaaagtgacacactagtcaaggttggtttattgtgtggtaggaaatccaaaagacgttggaagcaacaacaatagctctgaggtccttggaaccaggagttttgaaacttttactttactgcacgtctgttgacatgattccatgaatatttctgctctttctcccttatgtataccagatccactgggctgagttaaatataagaccccaagcatggtcaattcttattaatagtccttgaagaggctctctcttgtttttgattgactttctttttctttcttttcttttcctcatcctttctccttcttccattctcccttccacctcacagaagcctaacgggcttggaatagcacttataaatgcatgaatttttagaaatatatactattgttttcatttccacaataatcatgcctaacatttatcagccacttcccatatgctaggctctctttcaagtcctttaaatgtaataactataataatctcacaacaaactccatgagacagggactgttatctagtgtgttttatagattagaaaactgagacacaaagaaagtaactttctaagctcacatacctggtgagtcagtagctgaggcaagatttaaaatcaggcaatctgactgtacatctcactcttcgctactttgtccttgtgcctttagatcatggttctgtgctatcgatctgatcttatttcttactctttttactactgttgttgctcagcatagtcttcccccctcaaaaataagtaacatttatattgctattattattattattattttgagacagagtctcgttctgtcacccaggctggagtgcagtggcacaatctcagctcactgcaacctctgcctcccaggttcaagcaattcttctgcctcagcctcctgagtagctgggattacaggcgtgcaccaccacgcctggctaatttttgtatttttagtagagacagggttttaccatgttggtcaggctggtcttcagctcctgacctcgtgatccgcccacctcggactcccaaaatgctgggattacaggtgtgagccaccacgcccaacctgtattatgaattataatacatagataacgtgtaaatatttaatgtcacatattattcgtgtgagttagatttgtaaatttgattagcgctgagacattggtattagttttttctacagatgagaaaacaattacatacttttacaaatgatacaaatatgtgtgaaatatatttaatcacatacatgaataatgctcagtgagcaggcatagaattgtcaggacctttgcagtatctccaatatataccctgcccatagattaggaactattgctgtactattgctcatcagtttaaataattatgttaattcacatttatctatatgatcagcataatctttcaaaaatcgatttacaggcctggtgcggtggctcacgcctgtaatcctagcactttgggaggccgaggcaggtggatcatctgaggtcatgagttcgagaccagcctgaccaacatggtgaaactccttctctactaaaaatacaaaaattagctgggcatggtggcaagcgcctgtaatcccagctacttgggaggctgaggcaggagaattgcttgaacctgggaagcagaggttgcagtgagccgagatcacgccactgcactccagcttgggtgacaaagtgagactctgtctcaaaaaaaaaaaaaaaatctatttacattgcagctcctttaggaggtttactacttgtaatactgtagagtcttccagagtgtgcatccattgtatttcactgattgatttcgttagtgatacacctcaaagtgaggtagtcatatacctccaactcttggctgccacaaatgtactgtcgtgagcattttgtatatgtgttcttaatgattggcagaagttagctcaggatttgtggctgtggggagggtgcttgatcatagtgcattttaatattgagtttcactaggctctgtgttttttgttttttgtttttgtttttttttaaacataaaggcttcactagggttactttcccccagtaaagcattaggattcttgttttcttcatgccatcaccagcacggggtattgcatgactttatattttttgctaatatgatgggtatggaactactagtacctcctggtttctgcttcttttccatacatagtaaacagattcagtctctcaaaattactgggaagaaaagtgatttgtttcataagtgttaagtgtctgtttctggtcatggctatctctgggactgtggtcatagagaggcatactggctattcagcagggtttctgagtgggaaaaaaatctcttgaaaatgtggtgttgtcaaggaaggccattttactgatgttacttcagggcccttctttcattccttcacatttttcaatatttattgtatggcaattgcattgtagaaacttttctaggtacttgggaacaaaattgtgaacaaaatagacatgtcctgtggtttctctggaacctttagtgtggtcaaggggacaggcattaatcaaaatactcaagcaaacatttaattacaaactatcatgagtgctacaaagggaaaggagaagagctctggtatataacggggtagatgatctgtgtgtgcttacttgatgcaggtgtcttttggggatgctataagacagaaaatttagaggataaggtaaagcagtaggaggaatattcagacagagagaataatgtgtgcagagatccacaggcaagagggaatgtggcatcctcgagggatagtgaaaccagagttgttttgaggacttttattcatttattcaacatatttttatggagtgcttactatgctctagaatatgacagtgaacaagacagaacactaggagatgtttgagatgaggccgaaaaaataggtaaggggctcgccctattgtacactcatctcccttggtttgtttttttgtgtgttttcagagagaaacagccgtacttaacaatctggtttcagattcttttaaccttctgtttgcctttctctgaaggtgctacagtttgtttgacaccctcttcaagaggggccagtagaactaaggataaaatttttaagtcttcccatcaagaaatgtgtcgttaacattaattaagtttcctcactgttatcaatgaatatccctccgtatccttctctttcactagctgagcattatattatgtgttgttcaagggcagatagtctgtgaagaagtgctttaaaaactgatagcgtgtgggctctgagcatgttgtgcggctgactggcccccacctcctcttgtttcctttctccccagaaaggcctcacttgctgcatgacaagtcaggctattgtttgctcattcgatattgtcagctaagatgcttcacaattccttaagaatttattattgttgttgttgagggatgatagagtcctcttcttctcatttaagtgacgtgtatcgaaaaggaaaaatgacaaataagaaaggacttgggaaaatttcctccactcctgacttccagacctttagaacttaatgctttccgttcagtacttctgccccctaaccttaaagtcttgagagaagaatgactggtgttgacaggatgcttgtttactggcttctgcctaatttttgaggcatgaagtggccatctcatataaagcaagtagttcacatcctgggactgagactacaacctggtttctccttgtcttgtttcgatggagttattctgtatcctgtgaagaatctctgttttgtcatattgtattccctctttaaatcttttatatctctttctcgtactattttgcccctgatgctgtttctttctttattttaagctttagattcacctcttaagttgtcagcccacatggccatacatgaccatggttcttactggtgtgaagaaagcagattgtagctggttgtttgagatgccttcttaggtggaccaacctctctcgggttctttggttttatctcttgctcttcctcttgaatgtttatgatacttcctggtcacgtcatttctctttgactctttctttcttccttccttaggttccggattcatacaggtatgaatctacttccccatctttgccaaccctggcatcgtgcccccttgattccttggcttttcacaggctagatgcttaatggactctggaagcctttatctctaggacgcctttatctgtaggactgggcttttttgtttgtttgagacagggtctcactccgatcacccaggctggagtgtagacctggggtttctaaacactcttcaccttgtgctcagctccttgtatgataccgaccggatcctatccatggacaataacaatcttgaatgtgttcacaatgcctgggggaataagtcccaatccggccaggaaatgctgatctccttccgacgggatctgcttgtctcacctcagcgccagttgcttccctttacaatctctttgctggccaggttagaacatgtgctaattctctgaaaacacaccatgctttccttcctctgtgtctttgcttgaatggttctctcagtccagaatacattttaaatatttctacttccacaaatctattctatagtatttatcaaaatagtaccttccctattaagtctcccctgattctttagctgaaagttattttgatttcctctgagttcctgttaattttgtgggtacttctgttaggcttcttagcattctacagataaggagatgggacttcgtttaaacagctctgggccacaaatatagcatgtagaactgtggagattctaactcacattttaacctaaaatgccatactctttttatcctattacattcttctcattccatatatgtctatcttatgtagtatgattgaaggcagggtgcttgaataaggtgtaatgtttttgaatacttagcatatcctaggcactgtgtgacatattttgcatttatttaatttggctgtcataaaatttctgcaaggcaggtacagttactattcccactttacatatgaggaagtgaggtatggaaagattatgtaacttgtccaaggttaggcagctagcaggtgacaggcaggacaccagcttaggcagtgtggcatcacagcctatgcttgtaactgccgtgcaatgctgtaggtaagcaagagctaacaatataagcctgaaactactggctttctcagttgatggtatttgagaagtgtggtctatgatattcctcagtaactttcatccatggaaaaccaacatatctcatttctataggttttaggatttaaatatttttaaggatttttctgttgtagactttaaatttacgatttgagataaactgaatgctaaatctttcctgcttgggaagaattcagatgtaaaattgtaatttgtattattggaaaacaactccagttttatgcattctatgcaaggatgagctatgtattagttcattttcacgctgctgataaagacatacccgagactgggaagaagaagagggttaattggacttacaattccacatggctgggggaggcttcagaatcatggtgggaggtgaaaggcacatcttacatggcggaagcaagagaaaatgaggaggaagcaaaagcgggaacccctgataaacccatcagatctcatgaaacttattcactaccatgagaacagtatggggggaccatctccatgattcacatgatctcccacggcatccctcccacaacacgtgggaattattggagtataattcaagatgtgatttgggtggggacacaaagccatgactagaataaaccacatcaagttacctgcttatctaaagttttagaaggtgttcacaatgttattcgaaagccaacttagtgtagtgagcatttggagaagcatcctttatacaagtgagatgacatacattgttaatatgtgcttttatgtttgtctttgcaagatctgagctagaatagaatcatagctctagggccaattagagtgggagatagtttaatagataacacaggtgctattttgtcaagttgcatggtttctggacagtttacagagaaaaaatttttagctgagagcctgatgaagtcttaaggctattattaatagtaatatttggggactagcaaagtgctcacataaaaagcaccaacaaggattaaaaaaagagaaggtactgaccagattcactgccttctattcccaaaaagattattaaaaggttcatgtaaatagaatatgcgcacacccaggagaaagtgatttatttttaagctgaagccgaggttttacacatccctgataatagggtttaattaatgtttggagtgaataaaacacactcagaagaagtgtagtcatatccttaatttccttgattggcaaagtaattgatatcatgtgtgacatttgagtcagtgctattttatcagtcacttgctctctgcgagacagagactgtgattgaaaacagtaggtatgggtacttgattttaaaatgaactctatcataatatactgattacagaatcagaagggcaatgttggtgaatatttttgggcaaaaaatgactgtaacctattctagatatggtaaaaccagctctcagtacttaccctataaagagaatattggtttttttcagaattttgcagagggtctttttacttagggaacaaagagaactgtaattgtcaaatgtggttgtaaaacggtaaatctatttttgttcatggctcattcattcacttggcatttaaaaaaaaatttttttatttgtttattttagagacaggattttgctgtcacccaggcttgagtgcactagtgcagtcatagcttactgcacgctcaaactcctgatcttaaacaatcctcctgtcacagcttctcgagtagctgggactattggtgtgccccaccacacctggctaattttctattttttgtagagatgggatcttgctatgttgtccatgttggcactgggctcaaatgattctttgctttcgcctccccaaccactgcgattacaggcgtgagccaatgggcctgacctcatttggcgtttattgacaccatattagaaaccctgtactacgtataaagattattgggggaaacttctcagctatgcatgtgtgtacatgcatatgtgctcattagatcttggtgtaagtacagtttttcttctagtcatggtttaaaatatctgaaaaggtgctatggggacacagcagtttacaccaacagggaccttataattaagtagatatgactgtaacatagagagcgataacgttataaaagaaacacaggtatgttactataagaatgtgatgaacaaatcatttgataaagatatcagcagaggcttagtgtgggagatgccttttggctggacttgggcagttggttaattctgaatggggtttggggtaggggagtcaggtgaggattggtgtgtgtaggtatgcctaaaggcgtgaaaatatttccaagaaggattgcgtttctttttgccactgatggcagagtcaacctcggcttctgagtttaagaagagtgtgagcacctcgagcaaataagtcagctaaacaaatggagctgaggcattagaaaacgcctgtcgatttttaagaaaaggagctcaactctaagagtgcaaggaaaaataaatgcgtggagtgacaggataatagtctataattacttttaagattgctatattgaggctgtgacagtcacttagttcctgagtcttttcaggaaagggtaagaggtaactagccagagctggagtcactccttgtagaagttaggtggctttgatagtgacattaactcttcagaaactccatgactattatttggtatccaaagcagaaatttatgaaagagtcacagaattttacatctgtaagataatcttttgaaaataattagaaagaattcaggtttagaatatacatgggtgatagacagagtagtgaaaacatccccagaatctggtcctgctcaaaaatggagcagagtttcttagaatgcactgacgtcttcacattgaccctgcacagtaccatccctgggagatctggcaaaggagacatttcagaaatgtgtgagttaggtgccatggcattaagatcttttcctactgtacaacttcccgtttttaaactcaccatcttgatgtacagctaactaatgtaattttccaaagtttctagagaagacaacaaccttattgagatactgggacatctgggtgccagtctagttccagttacatcttacttttgaaagaaaggaaaatccattaaaattagaatttgtctaggaagcatctccctcccaggagcggagtactagctcttcactatcattggtctaagcgcttgaaatgctcccatgtttggaatcccattgtttatgtatcagttctcccaacacttccactcgttaggggtatgatttaagagttaaggccaggtgcggtggctcacacctgtaatccaagtactttgggaggccaaggggagcagatcacgaggtcaggagatcgagatcatcctggctaacatgatgaaacactgtctctactaaaaaaaaaaaatatatatatatatataaaattagccaggcgtggtggcacacacctatattcccagctacctgggaggctgaggcaggagaatcgcttgaacccaggaggtggaggttgcagtgatccgagatcacgcccctgcactccagcctgggtgacagagtgagactccgtctcaaaaaatatcctttgaggtcacaggattgatgctatacaaatagtaattgtattattaatgatagaaatatgaagcatattggtattaaactatgagctgatacatggagcagcagatattgtatttttagttcatttccttaggcaaactcaaatattgtactcacacagttacctcaggcattcacaagttagagttccagtgcaaacagtttgcagcaaatatgaaccacagtggtactattagttttgcatccactaggcacattttccagcttctgaagagataattgaaggagaacttggatatgggctaaattgtgtatatggataaaagattcagcagggatttaagcactttcgacccacatgaaacattaaatattagctgagactcacttgaagatggacttcttgattttgaagagttgtctgcatttttataaaactacatgagcatagtgcattttaactaataaaggaagtgaacacagttgagatgcattatctttcttagccttagggtactgggtgttactattataatttttaaaaatgtatgcttttcaatttttaaacagtttattatggaaatgtttaaacatatacaaagggatgagattactataatgtaccgccaggaatatattatccagcttcagcaataattgactgatggccagtcttgcttcacctatacacctattcctttccctcaccctggattattttgaagatagtctcagatattacgtcagttagtcacttctgcaaattttagtctttagtaggtatgtctaaaacatctctcaaccataaataacatgtcaggagagctcttttgcaagatgtttattgatcttgtgccttttgcatgagtatgggaatggctactgtttatggaaaaggagattaaagaatgcagtgtgggttttttttcgtggccgatttctttctttccttctttttttttttctggaagtaggattggtttggggcatgatgtaggaatgttattgggtaagggtttaaactctatgtggcttctgtggtttggagagaccccaggttgatctgatctactatagttaacaagtcagataaactagattttatttgtaatccttttgtactgaagcccaaacaactggcattcttaaattagctagaatatcacttagtattccatttatagaagagttgtggttttaatttaaaaaatactgtaagtggagctactgaaataggcccaagtttattatagctaatacttcattacagagacttccgccattccctaaatctaaggagggggttgtttgtataccaaacatagtagatgtttctgtttgactagattacctagaaaatggcacctagggtaacaacttatgtgcttaatttgaatgaacacgcccagaaaaacaggagagaggaaaaaaagaaaagtaagagaaaagaggagagagagcacatagagagaggtacattatcaagctgtccacagcttcctgacaagagcagctgagttcttggtatcacagcacatcttcacaaaggcctcataaactagcgtgtctcagaatagttcattaataggagggaggaagaagaatttacgtagcagttcctgattcccatcgttcaaagtacatatttcctttttagtattgacttttccaggaaacttgttttattagtactcctactttccaaaataattctctatgtatggttttattttttaaaatgaaaacgataggaaagaaaattcttcgaattcattgtcatggggactcatactcagagaattggatatgacaatactcaacaccaaacctagttctgaaccccaatatctgattattatcaatagaatcagatcaagggaatacttattttcctcttagcaatctatattgattattcatgggggggggttctttgttctgagatcaggagaatgccctggttatatgtccatgtgtggccttagtcagtttctcatgtttcttatgttcatgtatcttttgcttaaaattggaaatatctaccttcaaggaaatactgtcgaagacatggttgacaatttcatagcagcagtttgatgaaatcattttgcacactgagtaaattagtcaattatgtaaaaattttatctgtagttttgtccaccttatgacaaaaattttggagaaaaacaacagccttattgatttacagacatctttctatttatcagtactagcatcagctttctgggacatgtcaactttcctgtttttgagtctgaatggatccataaacctaaacttgctgcaattggagtgcagatatcaagactattgcagaggtcttctcacacattatctgtgtgccttgagaatgggacctctactttggattctatttcatccatcctatacaaagagatcaagcaagataatcacgtattctctgtgctttggcctttgaagactttaaatgacttagcttggtattaaatatttcatccaggagaagttgggacttgaaaatcaggctttgtcccttgcagaaaacttgactggttccaggcgcagttactgttggaacagaattctctttaatcttttgcggccattatcaacattgattttattccttgtgcagggcagtagagttccagcttctgtgttattacttttaaaacatggtataattttaggaaaccattttctttgtttctgaaggtgtatgtataggctatgttcttcacattagatttttattttgaaagaacatggcaaagtgtggaaaacaaggaacatagttaacatgatcaagatatctgaaattgtgtaattagtgatagcttggataaagttgatatgaataagtaatatagagcagggagtgtccatgaatggagtggagttagcctcatgtcaaagtttactgtcccccagccagacctcagcttgtagacttagtattcaatttggttactctactgtgaaagagatactctcatctggagaagaccagccaagatagagagagaactaggctatgtcttgggaggaactgttgaaagagattgtaaggtgactttaagaaggtgataatcagggataccagaggaagacttagaggactccagaggatagaaatatgccagaatacagaacttaaacagaggcaaattttcattcagtacagaaaaagagtttctgacaaagtgatctgaaggtagaatgggctgtcctgggggatggtgagctccttcccactggaggattttcaagccttagcctagtgacccctaaggatatcaagatgtacaagggtcagtttgtggtttaactaggtgaccttcccctccaacctaaagacatttttgttgtctggctagacatcttacttcccatagtcttttaaaaaataaaattaaaaggcaataaataacttctgacaaaagaaaatagaagccatgttcttatcacccagtaatgaatatattgatatggttctttcaagtaacttttaaccttttacaatatacgtatcaaatgcatgtatcataggtgatatgttcaataatttttgcaaattgtgcatttttgtttaaaaaacacccagatcaagaaatagaacctcactagtcactcagactacttcatctccccatgaaaaacaccattatgatgtctaacagcatagattagttttgcttatttttgtatcatatgtaaaaggaaccacacagaatttattaagtatttttaattgtggttttcgttttttgactcaggcttaaatagctctctttttattgtccacagatttttatatatgcctagtcttgcaaagttattgtaggcagcaccttaatgaggttttaagggaattttgctattctaacattggaaaatttaggctgttttcagtttttatctgttaaaatctttgggcttgtagctttcctatcccctccacacccatttcttcactcatatttctcacaatatttcaaattgatttccatatgtggaattattagatcaaatggtacaatgaagttttaaagtttgatatttaccaaattttaatccaaaagttaccaaattatacttgcattagtaatatttaatagtgcctattgctttgttttaaaaaatgtgctaattttatgagaatggcttttcttcaattattaatagggcaacacttcctttcacgtttgtaaactagttatagatttggtacatgtagtcagtcactgtgctaaattctccttaagaattacgtctcttttttgaaaaactaacttttaaaatagacattattattattattattattctcattttgaagatggggtaactgagaaacagagatactaactaatgtagctaatgaagtgaagctaattagtgtcacatttggagtttactcaaaatatgatactcttcagtttgatatgctactgcccttcatgttatcctttttaaaaaatatttttaaattgattgtatattattgcattagcatatttagccaatttatatgagcttcatatatagcatatgtgtgtgttaccttcctggtaacacaccaaatggctcatataaatttagccaatttatatgagctttatatatatatatatatatatatatatatatatatatatatgcatgtgtgtgtgtgtgtgtgtgtgtgtgtgtgtgtgtgtgtgtgtgtgttacttttttgggtgtttatttttaattttgttccaatttagaagcatataaaagtttgtttcaatgtgttttttaaattattcaagttgtaatcaaactgaaactaattttggtcaaaggtgaggctctacattgatttttaaataatttacccatttttccaatttcatttaataaataatcttttctagccgagcacggtgggtcacacctgtaattccagcactttgggaggccgaggctggcagatcacctgaggtcaggaatttgtgaccaacctggccaacatggtgaaacactgtctctactaaaaatacaaaattagccaggcatggtggggggcacttgtaatcccagcttcttgggaggctgaggcaggagaattgcttgaaccaggaggcagaggctgcaatgagctgagattgtgccattgcactcctgcctgggaggcagagcaagactgtctccaaaaacaacaacaacaaaaataatctttcctttactgattcatttgtggtgtctcttttactgcatatgtatgaacgtgtggggtgtatgtgtatgtgtgttttagacataggatctcactctgttgcccatgtaggagtgagtggcacaatcatggctcactctgaccttgaactcttgggtgcaagtgatcttcctgtctcaacctccagagtaactaggactataggtgtgtgtcatcatgcctgactaatttaaaaaaaaaaaaaaagtttagaaatggggtcctgcaatgttgcccaggctggtcttcaactcctggcctcaggttgatcctcaagtgattaacctaggcctcccatagtgctacaatatatttggcaattatatctgcgtgcacggtttcttcattaatgtcgtcttattcctgtgtaaataacttccactcccatttcattttagattttcttacccatctttgcaatatcttcaaaaagaaagaagacttgcaagagtccaatgctgcataatattaataaacttaattttcttaaattttcttctctggcagagaccataagcagtatgatatttagtcatgctaggataagacctgagtagaaattgtactagctatccagctcgtttgttaatttacttttgatgaggcagagaacggtcatttaaccagcttttgttcagtgtctgttcggtactaggatctcctgagaaacccttgcatcctttatgtacttggtcctcataacattcacactaagcattcatggcagagccagcactggcacctgtggcttctatgttgctttttaccttgcattataccaattcatactaagaaaattgaagtgtgccctaatcacagtctttcatttgtaagtcgactcaatacagtattggatttggagttttgaaagaaagtaaaacctaatttccttccccaaagctattattattctatttagataaatggaaaagcaggtatgtgttgaggtttctagcttttaatctacagtgtttaataggttttaagttatttgttattgaaatcttgaagaaaacacataagttagatttcttgcttttatagcaaaatattttttggatggcttagggagtcaagtgaaccattttaaatacagtatgactaaatctgaaaggcctgatatggtagctgctagccccatgtgaccatttgaagttgaatttaaatctacattaattaaacttaaataaaacatttgtaaaaattagtctctcagccactagtcacattttgagtgctcagtagccatcccttgcaagtattaggacagtatggaacattcccaccactgcagaaagttctgtggtgcagtgtccatctagatgattctacaaatggaagatttaggggaagaggagaagtaagtagtgaggtgtacctaattgcttctataagttttagtacaaagaacccttcctttaaaatattgatatttggtgaaacattcagatatcacgttttaaagtgatttcatggacactaatcaacagagcaacaacatagatatatcattgactacaaggatggatcaatacttgttctacctgtttcataacttagaggattatagggcactctataacacagcaccttaagtatcagaaaaataaaggctgcaggtgtttgaatgaattgttggatgttctgtttttataaacatgtggtcttctcatatttacaccccatttggtttgggatgaatctccattctgagtcccttaaatgttagggaagcttaagatgagaccctttggattccacacaccaatctaatttcggacccaatttgaagctgaaaaaggcttactatggaaaaaaaaaaaaaaaaaagcccaagccccaaaacatacacacacaaaacaaagtagaacaaaaggggataccatgatctttttatcaaattaggataataggatgacatggaattcagaagacagtgtgatattctctgggaatttgttattttatgaatgttcctgactgaaatttaaataaaaataaaatccagagtatacttccccctttagtaacagatagaagtgacaccttgttgaattccatttctggattactctgtttttattttcatctattggcacccaggacctggtgtttggtttgtaactatgatgagtgggttgggattaatatgagaaattccgcaatgagtaagtcggaactattcggtgttatgtccaagaaagctcacatgtcctagttaaggctgtgtgaagtgaattggaccatcctgatgtggtggccccaaacactgggcttaatcctctggtgtgactgctttcacaggtcttttcaagagcctaagtaccataaaatattctcacaaaagccttcattccaaagaatgtgtgtgtcggctcatgtcaagagcttttagtgtagaacaatgtgtcgaaaaccacaatctaataaacaaacagataatctagttcagttttgtctaagtaatataatgtctttattaaactatttcctgcacctttagctctattcagaaggagaaagttctgcgtgggaatgtgtgtatatttactcttaataggaggccgtgtagctcctgtgactggatgtcttgtttttctcttctgagtagctcttgttttccatggtgggaattttccgtcttggtaatttggtattttacttggttttcattgtgaagtgtggaagtgtgtacaccttagttttagaaatgttgttttatcacctgcatctcagttatcaagggccaagtcagaaagttctcacgtgtttttaagcctttctaccagaccttgaactatccattaagtcaaaggggataggctatttccatgaagaaggtttagggattcctggcagggcaggaagaaggggcaagatttgcgaggatcagaatcctaggtactctcctttagactgcctggtgactactcatttgtcatatggaaaatcatggctcaatagttcagtagaatataactttgtggaaatttctgaatattaaaggcttcattttcaacacggcagtgagatgggagagtcagggtcattcattggtattgtccacgttactggttgctttttgtctgatcttgcctggagaattatttttaagtaatgtgcctggaaagtgcctacttacagttaggttaacggccatcttatggcatcaggaggagctttctggctatacctattaaaggaagccttagtctcttattgccattaattgacccttgcattttgagtcatagaatcataaaccatcagtgtcgagagggctactaagcagtttccttggattaataaagcttgtatcttctttataatattcatgtcaagtggccttcctgcctctacttgaatacttccagttatttgtcaatctcacatcctcaaaccaggtaatttctatttaatttttgcccttaatcttcagggtttataaatacctattgataataccttcgttaatatggtgctttgaaactcttcatttttttccctaaataaacttgtaatttttctttctatatcatgacagtagaggctcatatttttatgccttttagtctcagttatatttttgtctgaagagctaaatatacttgaaaaaagtggtttctgtcatctcagaacatatatatatatatatatatatatatatatatatatgctgtgtaaactccacctgtttgctaatcataacattcatttttctcaatgtgatggattttgtcaccacctccccccgcccccccgcctttatggcattgctatgtgaatcattgcaaaaactctgcactaacatttttcattctgtttataaggttcaaatagatagaacaattttctctaggctttagctctggtgtgtataattctggtcaggctcctaatctttttgagggatagtttccttatccataaaatggacctaagaaaagcaatcctatggggacaatataaaacttgtttagctgcaatcttaactcagacttgcttcctgaaattcctcaatctaatattaaataggggttttttgtttaaatgtggtagcaagattatagttacaaaaagaatagaacaatgcattaaaaaatagaagtatcttaaataatatgtttaaattttttaaaaatatgctgaaattataaagaaattcttagaaaatcatgaggaactctggaaaataggtacgatgaatacaagaacttttgctcttgtctatacttgtccttgcactgatgttcctactctgagtctagcactatgtgcagacttcccttcttatggtatgttgtggtgagcagaataatagccctcaaagttgtccacgtcttaatctctggaacatgtgaatatgttagggtacatgccacagggaaattaatgatgcacatggaactaaggttgttaatcagctaacctaagataatgaaattatcctggagtataaggatgggcccaacgctattacaagtgtgatagcaaatggaagaagaggacagaggaggtctttgaagtgatgtgatgtgagaaaaacttaacgtgtctttgctggctttgaagatggaggaaggggccacaagccaaagaatgaggagtagctttgagaagctggaaaagacaaagaagtggattctctggagagactccagaaaggaatgctgccctgccaacaccttgattttagtgcattgatatgcataactgatttctgatttatagaacagtaagataaatatatttctgttcttctaaacaaccaagcttgtggtactttgttgtagtaacaacagaaaacgaatacacacaatatcatgttaaaatgatctgtttatatgtttttctcctttctaggcaatgaattcctcaagggtaacaatgctatctttgaaaaatcattttagtccatttccatatgaaaagaatacgaaatgtcctgtcaaacaccagaggtggtatttactcagtgtgtatgcaccatatgcctggcactgccctgggtattttgctttgaaaattttatttcctgtctgtttaaccctactaaatcttaactttcttatctgtaatgtgagtctatggactagatcaggtttggcaaacttttctgtaaatctggtaactaaatattttaggttttataggccatatggtatttgtcacaactattcatttctgccactggaatgcaaaagcagccatagacaataagtaaatgaatgaccttggctatgttccaaaagaactttatctacaaaaacaggaggtggtctggatttggccatttggctgttgcttgttgacctgtagactagcggacctctttattctgttctaattcctgtctaatatgattattctgtcagtttataacattgtgccgtgtcagttaagccaaggaagtgccagtaagacctgaagaaggaactcaagtgattggatgggtctgtttataagaagaagcataatattggagactcaagtgccaggaaggggactgtcaccatgtccttggcaaatggacctgggacaaattctctttaggatgagacataaggagatccttgaatgccaaagctgagctcgctgaacttgaaactcagtgaactggaactactgctggaggaataaaagggagcaataaatcctttgcactccagaatgaaagaccttctgaggcagctggccaaatgaagcaggaggagggaacaagttcctcactcagctaaattatgtctttgggctggccgacctggtctgctaaaataacaaggtggctgaacttctgctcagaacacgtcaccaaattttgcaatttgggactgtcttctatcccatgacttcctaatctgaggaagtgaagaaagcagagtgaatgaaacccaaggattgacttttttatggagggcctccttagagacaaaagttgatttttcaagagaaccctttatattgtgaactctgtattctaattcaaaaaccgttaagttcttggatgaagaacatccaatagattttggaggtcttgtaaactttgctattgatctgggacttaacctttgcagatgtgggactgtgtgtttatacatcaaagtgggtaaagaagagcccatccagagctaggcagacggaattgggatatgtttgtttgtctgattgcccggttgtggtggttgtggtggtggcggttgttttgacttggttacatcatcgcatttttgaggacaaaactaccctctttgattggtatgttacaatagcttgtttatgtcttgcaaattgttcgagaacagtttgtccattaaagaaaaaagtgacctagtaatactcccctacccaggggaatgtcgggttaatcagttgcacaagggcttgatatgccaagtcagtactaccccgaggctccgtatgcagttcctttccaagatttttaaacattctggggagaacacaatatttgtttatttggcttctaggactttgttttgttatcgttttagttacggtcttatgcttttctctcactccctgtctttcttttacccctaactctttggagccctggtgtgctaagagccatgttaacagtaaagcatctattcaataaacacttaactatattttatatttgagcttctaaatgtttgtgaagaatgtgtttctgggcaagtcacataaagaataatctcacagtaaaaataacttatatttatgtaggacattatagtttttatggtatttctaaattcagtaaaaggcgaaagatttataccatctgaagaaaaaccagggtgttgtatttttaaatttaaatactttggtctacacaaccctgggtagtataaaaggtaagtgctgttgctctcatttacaaacaaaaatattgagaatcaaaagtttcatgatttccctaggttcacacacatctagtaaatggttccaagtggacaaaaacttacacattttaatgtcgcagagctatttttttatatatgtaagttacctaactgcagcagtgattgccgagatcatccctatggtgatgttcaattgagtctccctatttcaatctttcaacctctcttttcttctctctctctctcatacacacacacacacacacacacacacacacacacacacgcacacataaaccacatacacacacattttgaaattggtagtcactcagtttctcaatcttcctttaaagactaatttattgggctagaatttatgggtgtagttgtcaaaaattcctgcatatacccactcaggaaatattttcccaaatcttctccatctcaactctgtgaggcattggaagaggtgcttttaggatagactgatgactcatatatgatgtctgccctcagggagcacacagtttagtgaggtaaatgtctcatgaatattccacaagatccaccttgataatgctctaaagttactatagagggctgaaggtgggaagatgctttcgtctggtggcaaaggatagtagtgtagggtgacatgggcctccaagaatagcttgggctcagatagtggagaggaaactcttaacggagacagaggtgtgagcaaagtcttggtgtccaggaagccagaggaagcattctggcagattaccgggtatgtggcttagcaaaagtcattattctgaaatataaaatgtccagtgctgctgtctgcagtattagtctcaaaggatacatactcaccagtacattccagagtttgttgacaaactttgacaacaaagcttatcaagtttctctccattgcctcataagaggcccatccagttagaggattcctccttttcagaatgagatcttgtcaaatcttgggaggctcagaacagacgtttaccaagcttccaataatactctcaaaccataattctctaaaacttcagcataattgccataaaatcaattgaccatatattagagagtttatttctgggctctgtattctattccatttgtctctatgtctgtccttatgctaggaccacactgttttgatcactgtagctttgtgataagctgtgaaatcaggaagtgagtgtcctccaacttggtccttttttcaagattgctttggctattcaaagagagccatgatatttttaatctagcaacagttgtatcaaatacattggaaaaacctgggtcaggaagaatgttgactatctgggctatttgtttagtctagatatgaggtaactatgcattaggtattttggtggcaaaggagatgcagagcagtaaatgaattagaaaaatttggtgtaatttaatatagcttgtttgtattcagagtgggtggttaagataaaaaggaaaagggttttccacctttgtgatagggagaattgtgataaggtaaatagaaaaatagagcacacaagaggaggttagcaggtctgtgggttatcctatctaaattcagatttgagcactgagctagaggttcatttgatgatgctcattcagcaatcagaaattcagaggtgaaatcaatgagtaccacaattattctgggtcttattttacttataaatggtgtatttatttagaattgcttttttaatgtaatgcatttatggttaccatggcacaagagccagatactgggaagcagttggggacagcagcaaaaatcaagatctggataaaggcagcttcatgaggcttctgtgccttacctcagctaagagtaaacagagtgctagatggctgttgacatgtgttttattttgaagtgactattattactaggatctgaaatccttagccttgatctcttggagcctaatgttcctgttctccagctgagagagactaattcaccatcttgtgttgtaaacactcactcattttaactgattacacctccaatgattctcaaatcactaaaattactaattgctattccttacacatcaaagagtgaatcctgaataattaaccccaaataaaattagatgaattggcccttttaattagagtccctgctgctgtttgttctgagcttccttttcttactgttaagagacttttagaatgattaaaactgtttaagacttaaacagccagtgaccttttaatacaatataaatccatgaaagcaatatttcagctagcaggtggtgaagtaaatttttagagcaagtacctgtcagctccagtattcctttggaaaaaaaaaatacatgccaaaaaacaaccaccttgaaatgaaatgagtgtctctatttgattatttttaaagcattcatgcatttgctaagcttcagacttgatgaaataaatgtcagggttgaaggagagtgagtaatggttggcatcattttatataaatagtaacaagaatttctcagtgagaagaatttgaagtcatttgtgcataaaagatgaatactggataaatcacagaaggcccctggcctcatgtagccatccttgtcttcggggattctcttgaagcaagagaatgagccccaacattggggaaaaggaagttttatggggtttaattgctgctgatcatcgaggcaggattaccagcctagccatgctgcattcagcctggattttgttggagatattttacatgttcctgctcgtctattccaagtctcctaaatagtaagaacctcttctcttcttcatagtcttctgaatttgtaggggtgtagcgggttttctcaccattcccaagaagtctcagtttctcacactaagtctgccatgtgctgtggtcagtgtgtccttagctagaagttaagatatttggggtcacagtgggctgcctggtgtggttctacattctttgactgtttctctattttttttccatggtggaaaatgtattcatctataaaaaaagttattggactagttcaatgacttactttttccttaaaatttaaaacataaattttaactttttattctgaaataatttgagaccctagagaacggttgaaaatagtataaaggattctcatttagtcatcacccagttttcccaagtattgacatcttacataaccacggtagagttaccaaagccaggtaaacactgacataatacttccttctaatacataaaccttatttagatttcattgattgtcctagtgatgtctcttttctggtctagaattatatccagaatcacatattgcattttattgccttgtcaccttagtcatctttaatttcagagagagagttgttcaatctttgtttttccagaaggtcaatgattcttaaccagcgctatacgccagaatcattgaaggagctttgcaaggtccttgtctgggtcccgaccccaaagattctgaattaaggattctaaagtcaagtctgggtgtatgtagtgtgagcaagtgccccaggagattccgatacacaccactggttaaaagtcagatgagtttcaatacctcaagctaagtattttcaaattctgtctatgacatgtatccttccccttccctcatttctctgctctttcttcatctccatctctcttttatgggattaaaaagcaaatttaaatgtctctttatactcttaagggatatacatatactgggtaaggcttatcaacagatcttttattggagaagatcaatacagtacagatggttgcaatatttctgaaggctagggtgcccccataaccaggtggtgacttgaggatgaagactctgttcctatactttgaagacataccctcagtaagataatgtgaaaacaaacaaacaaaaaacctagctagatggctacattaagacaggttattaactgtctagctgttggtatcatgaaggacctatgacccaccgtagtacattgttgaccttatgtcaatatttgaaaagtggcaaagttgaccatgggaaaagttcatgtgttcattgtctcaagagttctattcaatttaatataggtagttttgtaccaataataatttatagcaataatatcattactgtttactgagtatctcatatgtgttctatatgctttatgtagagattataaaacagagagtctgccctcaaggagctgttaatcaggtaggggaaaccaatagttatccaattaagctaacaaagagcagaatattggctgtaatagagcttcagcaggaaggaagcctgcattatcattgacatgtcattgacaatgcattgacatgcattgacatgcattgacatgagaatggttccctctatagccaaagacagcagtggtgaaataaattaaatgccctatttaaagtgtttttattatgaaaccacgctccctcaggcaccatcattgtctttggaggggttgtaagcttctggccttaatgaccaccacagggtaatgtcccaatcctaaggggaaaggatgtttttggactattctgtcagcactctgatatttgtttgcaagcttctttgtttttactggtaaattaagactttttgttgttgttttcctgggatgttgcctcattttctgtccatcacatgaatttttagatttttgtttcatttttaaaccgaggtaattttactttttcgcattggagctaaagatatctcactagctgatagaagactgatgcattaagctcaactcattgtcctatttattttgaatgctcatctttggaagtcaaaaatatatggtgtggtttgttgtctggatagcaattactatgtttttgtaaaacaaatgatacttggtggattcaaaagtgctatttggttctagtcgatgtgcagagctagactattgtcttaatttcatacgatttgaaatccatttaatgttttctactgagaaattgaatttgttatccaaccactgcatgacagagaattatagtatgcttgtatctcatgtaatacactgaggtgtctcacatttgtacagggtacttatttgtgattataaaagaggacttttaaagtctcagatatattctgtattagctaaatatggagtgaaactgtccaatttaaaatcagggagacgtcatctactttaaagataattcttcttgctttttaatttgagaatctcaaagagcatttcaagctaagttatttagaaagatgacagggacattaaattttggcttgagtacatatactgatgcattaaaattaaacgctgggtttgagtagattctgcgattcattttaaagtatcttatttttggttttttaaaaaaatgcatgcctataattcacttattgtataataattaagccaaaaggataaaaaattgaaaacaatgcttagcatctcatgagctgtagacaacccctgttaacatacaggcctatataaaattgggaccatattataagcactattcaataacctcccttgtttcttacctgataagatatgaaaagcaggccgggcgtggtggctcacgcctataatcccagcactttgggaggccgaggcgggcggatcacgaggtgaggagatggagaccatcctggctaaaacagtgaaaccccttctctgctaaaaatccaaaaaaattagccgggcgtggtggcgggcgcctgtagtcccagctactcgggaggctgaggcaggagaatggcctgaacccgggaggcggagcttgcagtgagccgagattgcgccactgcagtccagcctgggcgacagagcaaaactctgtctcaaaaacaaacaaacaaacaaaaaagatatgaaaaacaattttttatgttcttcccccggatatgccaatacttactcccttactagatttaagtctttccccaaatatcaccttggtgaggccattttcatttttttttctttaaaattgcaactcccaccaccaccctaacagtcccaacccccttacttgccctacatttcatcatagcccttctcaccatgtgatattccgtttgatttactttttaagcattattcttctttggagtataagttccatggggcttcgtggagaagcacactttgttagttctatttgtttgtttttccctggggtctagagtaatgtatgatatatagatggcactcgatgaataaatagttgtaagatgtagatcaacatcattattttggtgaccacacaatttcccactgtatgattgcaatttatttttcaaccagtaccctgttaatgaacattctgagtttttgcattacattgctttgtgatgaagtttccttaacatgctcctctgcatgttaagttacttctttggtaggataatttattaaaagtgatattgctgaattaaagtttataaatatctttaaggcttttgattcctcttgccaaattttcttgagaaaagtttagtagcagtagcatatgagaatgctggtttccctatactattatcaattctgtgttttatcaatatttttaatcttagtccttccttttaattaatttgttagcaacttgagtattatcaaaattaatagtaatgttttctagttaaatagcagaaaatacaaatggaagaaaaatagaaaggttaatttttctaatgtataaaaggaacctgaagtttaaggatatctagcatgataactaaaaaattaatgttcctcggtcaaggtcacatatcttatttacagaggaagatgtgtcactgaagggagatatattgtgctattttgatgacaatgaggacagagaacatggaatggccaagccttgccctgataattatccctctcccagagagttctcaaaggagtttcacgctgtagaaacgggagcaaaatgagaatccaggtgccgctttattaatagcttcataagtgcttgctctccctctgggacagaggtctgtgatcccactgacatagtgcagaggctttggctctaggaataagtagaatttgtatccggtatcttcctcacaccactgtatcttggaagtcaacatactcagtgagctgcagctcctgaagacctggcttgacattctgatcctttgctttagagtcaagaagtacaacattccagctggtctgtcctgggagccagatgctcagaggtctgaagcaggaagtttaagaaggagatttcctgggtattgctttctaaaactgagactttaacagtagtagctggatcagtcaaattaataaccccttccttgtcagagagaagggcagagtgggacaggaaaagagcttgaaaaggtttcgtctctaatagaaatagcatgttgagcaagtcagtgcaattgctttcatattgttagttccaaccagtgcactgtaaataggttgagaaggccgagaagtgatgcattaaatgggatgtatcctcaatttttctcttggcctttgctgtaatgcatttcctggtggtttttaaaaccttactcagctgaacaattggagatgacacattttcaggtactgaaaatttctgttttgtgcatatgtgttatttaaaaattataaatgggtaaaataatgacaggttaagaatttgtataatggagagtatttcccttctactttcattcctcagttgcaaaatttagcttcatagaggcaacttgctgttatcaatagtttgggactccatttaaaagatagtccgtgataatacatacatatatgtgtatacattattaaataaatgataacgttatacatgctgtcctaggccttgaatgctgcatttaaaaatatttcacccaaggtgctttctggtacagttttcttggtggcacacatattttgatgcagattgaggatggagttgaagttgaaattggaagtgaagtcttcctttatttagtttcataataaattgcctgtagtctgtggagtgtacattatagctgtggcataattcattgccttatggagatcatcattgctgttacctttgttttatcctctcactttttctctttaagggaccttgttcagggagcttggtctcctcctctgagtgatcaagtttagattcagttgccctcttgtgcataaggaaaaagaaagcattgtcatgtataatgtagacattgtactaatcacttgcacgtaatttagctcagttatgttcaaaatgtaaattgagacctatttctgggccacagtcaatttagtgggtcagaaccaattttttttcaaataacagagcatttcaatgtgtgttttatttatatagtaggtatggtttcatgaaaccctttttttctagtatacatgtacgtgtacatatctagatagcaatattaccacattatataaaatatatttttttaatctaggttgtggtcaaaaagtttcagacttactgtgttagctgctttgatccacagattgacactgtgaagtagctgtggttttcctcatttcataggtgaggaaaactgggtctgggactatagaattgccttgcctgaaataaagggtagagctggggtttgtgttttaagtttttggacttaaaatttcgtactattttcctttcaaacatatatttttttctgtattagttactatatagttttttgtttttttgttttcttcttgttttgagatggagtcttgctctgtcgcctaggctggagtacagtggctccatctcggctcactgcaacctccgcctcccggttcaagcaattctctgcctcagcatcctgagtagctgggattacaggctcctgctaccacgcctggctaatttttgtaattttagcagagactgggtttcactctgttgcccaggctggtcttgaactcctgacctcctgatccgcttgcctcgacctcccaaagtgctggggttacaggtgtgagccatgcacccagccactagttactattaatggaaatgaataaccgtctttacttgaaacttatgctttgctaaccatgattaaaaaagtgttcaccttgtgtgtgtgcgtgtgtgtgtaggtattccaatccagtctcttttgacttcataatttagaaagttaacttgtggagtatctacatgcttttatgcttaccttaatagttagattttcctccaacaaccaaaaattctcccctcaacaaagtgggagaagcaatagctgccagctagcagaagctagagacatgtcactgccagtgcagcccatgggtctatgtcagcaacacctgagagcatgttggaaatgcagaatctctggctccagtgtggacctgaatcagagtctgcgtttgatctaggttccccgatgattggaacattgacatctgagatgtacgagtcaaagacaccaggtcatttattaaaacatcagttaaggaattgaatgggtttttatttttcagtcatgcgacctacagttactgaggatgttctggcccaaacctgtgactagagatgggcatataaagataaatcatgagtggactctacttgtaagaagctgcagttctaaccaggagggagtgatcataacacacaaatacaatcaagtattacagatgctctgatagaactgtatatgagacgcaaaaagggctgctatctaaatccttggatgtgtgtgtaggttttatatggatatttagatgaagaagagcatgatgctttctttgttttctttttgtaccacagtaaatgaatccaaactttgttgatagtcagagttgaattgttcccatgtgtttttctaccacaattacccataactagtaatttacttactttgcaggtaaattcttgttatcttcaccctctgatgggggcctttgtttcataaagggctaagcaagctctgcgttaggtagatgcctttcgtatctgactgacgcaagtgttagggtaaccacagtggggaatagctcagctggtcccagctaaccatccctgcttctcaaggccgcatcctttttacccctagattaaaagggagagcttgagaaaatatgcatagctaggtcctccggagtctttcctcactccctttttgagttaacaatatgcctaacaggctgttttctgaagtaaattggcagtaagtagtgtttgggaatcagagatggaatacttgatttgtccaactcctcatttaactgtttcttgctgctacctcttgcacccagcaaaaaccttttgaatattagctgaatgatttgggttcacatggagcaaatcaagcaagatatgtctcagcatctctccaagagtgagaatccatttcctgctctgtatttcaccagctatgtaactttgaataaaccattttacatgaaaattgaggcataaatatattttgtatgtaggtaggatttggaggatgagtggaggagtatggagggaccaggtctgaaggcacgtgtctatgaccactctactgcttctaaaactggacatttccattttagatttgatacatcgctgccaattgccggatggcattttgttttgttttgtttaaaagcttgcctgtacgtctcagagtctgagaggtgagttgcaatttccctgtaggtcagagaatctgggaggtgagttgcaatttccctgtaggtcacagaatctgggaggcaaggcagagaggacagggcatgcactaatatgaaggtctacagcttagctgtgctggctggaaggtactgcatttcatttcatccaggggctttcctccagaaggatcaccacctaggaatgaaagccgcatgctctttcattctttcattgttttcagaaatctattagaatggagaagacctccttcccccttcttctaatcatatataaatacagttcttttcattttcccatttttcttaaacatgataattctgccttgtctctaaagctgaacttattttcactgcaacttagaggcattttcctttatttacttgtctatgaaaatgatgagctctgagttagaattctcttaaacttttagtctgatttaggatagttattagcagtttttcattgaaactctcccggttagtttatgcctctctccaagggaaccatttcctctccttttatcagatttgtatctgtttttgagacatttgcccgttcctctacatcttttgaaaacgtgagcacctctctaaggaatgcagtaaggaccctttgatggttaagcttaaagaactgaaaactttggtctgacttaataattgatctaaataaagcagataattatgtgtttatcacgagggcttttaaacatctgccttttcatgcttagaatatagaatccatcttttcaagttgtttcttaaaaaaaccaaaaacattccacttttcttttttgttcgttttgaccctcccaggattgtcagcagcctgtgcctcactgtgtctgagttctattagagaaacagagtaaagaaggatatatttggaagggacagacagttgtactttttaagacttacttgttgtgacattttggacttttcatgtagcttctttatgacatagtttattgaacctttccaattttgtgggtctaaagtaggaataacatgttgtggttctcaaagtgcgatctcagacccagtcacatcaatcacccagggcctctgtttgataatatgatctccaagattttgttcagttctgatactgtctgatgctctgaaaatttcccatgatgtaacagaatctgatgaagtataagaggggacccaggaatccttttataaaatgggtatgaagaagacatagtaatatggtttagctctgtgtccccacccaaatttcgtcttgaattgtaatccccatgtgtcaagggagggatctggtgggaggggattggatcatgggggtggttcctccatgctgttctcatgatagtgagtgtgttctcacaagatctgatggtttaaacttatatggcagttcccccttcatgctctctctttcctgccactatgtgagatgtgcttgcttccccttcaccttctgccgtgattgtaactttcctgaggccctctagctatgcttcctgtcaaggctgcagaactgtgagtcaattaaacctcttcttctttataaattgcccattctcaggcagttatttatagcagtgagagaacagactcatacaacatagattcagatagaacatttgaacttggaaattaggttgtgaacagcaacctaaaccttttttgcctcattgcctaagctctcattgtgagcactgttttcatacatatgacctttaaaggcagtaaaaaacttcttgacagttctttttaattaacagatatgaaatattttttcatgcagtctgtggccaaatgaaagtttctcaatcctggctgcaggttcgaatcccttaggttttataggtgtcctggtgcctgaccccctcactccctgtcttctatccccaagattctgattgaattgctgtgagatggaatttggacatcagcattttcgaatgtgtttctttggtgattctggtatttaaccaatgtttaaaactactgaatggaatgcatacagatttatgggatttataattgtcataaggatatgtacaaattatttccacagatttgtgcacccagagaataagaggagtagaaattttctttatgttgtaagttattgaacatttcttatcctgtgggtctaaagtagtaacaacatgcagtggttattaaagtgtgctgtcagacccaaaggcatcgatcacacagggatttattagaaatgaagatggttggagttctccccagacctactgaatcagaatctctggatccaggacccaaaaatctgtattttaaaaagacattccagagatattgatgaactctaaagtttgagaaccatcagctttaagggttgttgtatgattcggtggcagtgtatgaaaatcttagcaaactgcctggcatggtgcgagtctagtaagcggagtactcgagagatagtgcttttgattgcttagcagtctgaatttggcttggggctagacctgacagttcttggcttagctacactttgaattctaagactgttatttataaggcaaatagaggcaaactgaaccatttcaaaggtgtatcagaacaacaaaacctactcacagtcattctaatgtgctcactcttccattcttatacttctatttctcagggcctaaactgtgatgttttgataatatccaaaagcaactcacttaatgatggagactgctgccctaacccacaaagtgttgagcaactaaaatgcaaggaaaggctactcctccataaatagaaaagatctcttctccaacacatcaaaaacattatttttaataggaaaataacaaataaagaacaggttaaaaggtagaagtttctgtttccccaatacagttttttgcagactatttaaaaaggtttcattccaggaaccataaagctcttggatatatgtgtataacttagatcacagagatcaggttcactccctcaataactctgacagcagtgtgcttctcttgttggtaagagatgctaggtttttctcggtatcccaaagtctcattacttcttgcctggattatgtatagatttctaaattgggtgtttcttattcatttctcctaatctgtcctgcatggacttttacattagtctttagtaaatcgtattgtaaccaagtgtttctttctcagaaatccttggtggatctctgctgcatgcatgataaaattcaaaccctttttttgatgtgcaacatgtaaaaaccttaattttatcgcatatctaatctttataactcactggcattattttacattcctgtgtcccatgtttttcctatgtcatgacttgctttttattctctatgctctgaactttctgatcgccatgcctacattctcctgtctctctaccaaggatggacgtaccttctacatcatgtttcaggaaaattatatgatccactgagacttccatgatcctccactttatcttaatttccagaggttattcatgcatctttataaattacaccttgtgttatctttagttttgtacaatttttcttcctcctctatttgattgaaaatgtattgagggcaagcaccaaggtgtataaaattcagtaactctatctcccacccaagctcattcttcgctttgcttaatatattgacccctctagactagcttttataccatttctaaatatcaaatccgatactctttcttctgaaagttaagactactaattaaggctactaattaaactaagatggggaataattgctatacaacacaaaattatgtgtcaaagccaattataaaaaagtaaaatgccagcaaatatatcacgagtactataacgttgcatccttattaacttcatgttgtttacttcttttctgtaggtgattttcttccacccccacctccacctctagatgattccagtgcccttccatctatctctggaaactttcctcctccaccacctcttgatgaagaggctttcaaagtacaggtaagagctgaagttaaagtcatgttaggtaagagctgaagttaaagtcatgtttataagccatcctagggagctcatgaatttcatgagtgtttctgtgctggataaacatttatccagagcctattgagagctttacaacttatgaagatctaaggtactttaatgcaacatacccaactcaagcttcccagagttctgctggcttaccctctgaagccctcaaaatacttttgcctactaattttgtttcagatcccaaagccattttttttttaggaatactatttgagaaggcaacatttccttgttattttggaggacatacagccatgtctttttattgctatgttctctatcttcaaacattgcattcaagtgagtaaggctgacattttaaggctgtagttggttaatgtggatccttttggtcagcaacatttttctagcaaaagcaacatcaaatatccttaggattttctcttctgggtaagttcaagggtgcacatcatacttatcaattatatagaactcttgggttccagcgagtggtaattgcaaagtaactcggggctgggatcagatgtgacattagaagtggttctcagactgtgatcatcggtaactgccgaaagctgccaccatttaagctgaagaagtgctttatgtcaagaagaaaatctaataaagtgatagaattattgttatagttttaggtgtgactatgttcgcatagatacattgaagaaaaaaatgagtcttctttgtctttcagagaaacattggaaatgtttgtagataaaatggaatgggccgggcgcggtggctcacgcctgtaatcccagcacttcgggaggccgaggcgggcggatcacgaggtcaggagatcgagaccatcccggctaaaacggtgaaaccccgtctctactaaaaatacaaaaaattagccgggcgtagtggcgggcgcctgtagtcccagctacttgggaggctgaggcaggagaatggcgtgaacccgggaggcagagcttgcagtgagccgagatcgcaccactgcactccagcctgggcgacagagcgagactccgtctcaaaaaaaaaaaaaaaaaatggaatggtgtctggtaattattttcaaaataataagggttggaaactactgagtgagaacatgggtgaaatagggttggttatgatttgataactgttgggtgcatggaagtttattctgttattccgtctaccttttaaaaaatacctaatatcatttgtggaacataaaatatattgaattattgctcattaattttatcatttgttttacagtattattttttcattttaatttttgtagctacaagtaggatatgtatttatggcatacatgagatattttgatataggcatacagtcttttaaacatatacctttgtatatgtttaaaatatcctataataagaagtgtaaaagagaaaaagtcttagggaacaactgcttaaatggtttgttctattatttgcctttctttctcctaaatttgaggttgaaggagacaaagaaagaaatgattcattcgctcaacaaatattctgtattcctatgtgggcattattcaagcactaggaatgttatagcaaaaaagacagacaccactctgtcctcagggaacgtaaaagttagtgggactagtggaaataaacaagatacgcacattacaaagtacattagagtggataagtggggaaacagggagggggtcaaggcttacctactaggatgggcattatcaatatggccccactgagaaggcgacgcttaaatgaggacttgaagaaggagaggagggaatgagctctagagatttcttggggagtgtattttcatatagtagatattaagaagtagaaaaggcttttgatattatctatcatttgaaatcagtaaattgcagttgtaaccagtaagtaccaattcagtttctggagtctagatcttttaaggctattgaaaaatatgtgtattgcaaatataggccatgaatttcttgcattttattttggtgtatactaataaaatcaactatcagatgccagtgatgaatgagagtcctataaagtttgtatttattttatgtaacagatagaacctttggcaaataaaaccaatatgagtgatttttcttaattttagtcattttttaataaaatgaggaaatccttagctttggctttaatatacctttggtcttactttgctgaagttggttttttgcatattgtttaatatgtacaatttttaaagtcactgactctgtttcctctcttagattgtcatagaaactattttgttgcattttaaatctttagttctcacaatgttatttgaagtagtgacagaagactcgtgattgaaaactagttacatagattattctagttgtgtgatcttgcgcaatgcatgctgagtcccggtttcctcttcattagaaacaaaacaaatatatatacctcttacaattaaatgaaatacagatggatttgaaagtattaaactgaaagggctatacaaatattttgatgttatattaataatcactattaatatgtaagaagactagtaaggattttccagtgggttccattaaaaaattcaaccatggggctttcaaaagataatgaagaatttttttcaggtggaccttgttctgttagatgtactcaagccgtggctttgtttttgaagaggaaggaaataaacaaaatgcctgttgtcatgttggcttaagttctctgtaaaacagaagggaggaggataaaaaataaaatacggtttgccaaatggaaaaggacaaatctggtagggagaggcctgttatttttgagacgcttcatatggaagattgttgatacattcaaaagaaaacgaacatgccctccccttgtgcagaagtgacttagatgtgatagcggcttggtcctgctctggcccaggtttgtaccagctatagaaatgagccatggtagagcctaaagtagcatgatcactggagaaaattctgcgcagtttcctctcggctatggttaaaacctcatgttcccaagtccaaattatagctggtaaatgtgtgtttttatgcagaagactgtttatgtttccagccagattttcaggtcagagccaaaagaacgtctactaagagtgattataagagttgtaagattttgagagcagaaagggaccttagagatcatttagtccaactctggcgccaggcatctagttacagtcctttcaagtatttgctaaattaatttccttttttttttttttttggaaatggggaaactgagacccaagaagggatggatcctctggtttctgacagaggtcttattgaatttgaaaaatcttgactcctggccttgaccttcttcctgctgtcccagatggcccatgaacttggttttgctttagtcctctagcagacttcaaggctctgagattcattgcagagggttacacgtttttatttggaaggagcaggtgatgccggagttttgcttggctgtctgaatttttgatatatgctataagcttttatttcttcaaaaaaggcaaataaatatttagccttaaggattcttggtttaacagttctcattttcatgtgggaagatgcaacttggaaaacaggggaaggatttggtttgcttttctgtcaggatcaacgtgacctccatgcctgtgatgtttgtagtgacacttcagcaatcactttattaattcatttgttcttcattcattcagtgtaaattgaatgcttcttgtaagtagacatatatgctagtgattatagccttaaaacttggcatcataggtttaatgctctgagtctcagccttgggacggtcagttagttttatttatttatttatttatttatttattttgatacagagtctcactctgtcacccaggctggagtgcagtggcgggatcttggctcactgcaacctccacctcccaggttcaagcgattctcctgcctcagcctcctgagtagctgggactacaggcacccaccaccacgcctggctaatttttttgtattttcggtagagatggggtttcactatattggccaggttggtctcaaactcctgaccttgtgatccacccgccttggcctcccaaagtgctgggattacaggcatgatccaccgcgcccggccagttagttttattcttatctgaccccacagttggtaatttcttcctcttttcagccaggccataggcaagtattagtattatataacattgcttaaggtagttacaaagaagtcacgtgtctcagaattttggacttgcaagagaattagagttaatacattcaagttcctttctattgtttgaatcttgtaattttttcctacataacaaaatgtttatgggtaattatgataggtgaggcagtgctgcaggataaggagatggatcagtacagtactcagaatcacattcggaagatgcatatacacagtcatttaagtcattttatggtaaattatgctttggtcatcatacattgatcagaagcataatctaagtcctaggttagtggtggagagtgagggaagtaaattaactgtgactggagagaggcaagaaggattcatagaaacaatttaaattgaactgaactttgatggctgggtgggaccttaattttcagataggtgagtggatttttcagcaataaaataaaagaattaaaacacagaggaaggagagctcaaagtaagtgtggtaggccttgtgtttctaactgtggaacctactctttgttctgaaaccattgacaatttattgtaggggcttgttattattttaaatataagggtgatatccccagaactgttgttggatgccaagtgatactgttaacataaattaaggcaaaacatgttgcacttgcaggaaaccccatgcaaacaattctgagttgtctggtagacttccttcagatccatggggacttacctgctgacatctgatggctttgaattcaggggctcaatatttaacttcctctttttatgatatctttgttcgtcttttcttggtgacttccagttgacaacttctaactctgcttctctgtttgtttcccagtcctgtggcttgctttcatttgcctactattcagtatttgcatacctctggttttcatctttccttttctgtttggtcctgcaaaatggccaggcttgctaatgtaactccaggccctccacattagaaaacagaggggttttgtccattggtgattacttcaaatgttaaacatttctctttgttattgagtagaaatgtgtccctttatgatgtcctcatattggttttctttccccttttaaaaagtgatgcaaagtcagaggaatgaccaggccaggagagagataggtgctgtatgtctcaaggagttgatgagtaaagctactgaaagatgttacttttcaaaggagtgagtaagcacagagtaacatgagctatgcccagaattagtggaaaagtagagaaatgtctgaaattgtttattttaaagtcagcctccaaaagctcttgagcatctattcttgtgaaaacaattcaaagctcatatatgtgtatgatgaatagtggcttataatcttttttctttttttttgagacagagtcttgctctgttgaccagcctctgcctcctgggttcaagcgattctcctgtctcagcccaccgagtagctgggactttataagcacgccccaccaagaccggctaattttttgtatttttagtagagatggggtttcgccacacaggccagtctggtcttgaactcctgacttcgggtgatccgcccacctcggccccacgaagtgctaggattacaggtatgagccaccatgcccggcctcattttcctacttactaattttatgtgtttagtttaacaatgataatttgaaaatcaattcaagttttagcaaaactggcactggaatttttttttttttttttttttgggacagagtctcgctctgttgtccaggctggagtgcagtggtgtgatcttggctcactgcaagctctacctcctgggttcatgccattctcctgccttagcctcccaagtagctgggaccacaggcacccaccaccacacctggctaatttttttagttttttatttttagtagagacgaggtttcaccgtgttagccaggatggtctcgatctcctgacctcgtgatccgcctgcctcagcctcccaagtgctgggattacaggcgtgagccaccgcgcctggccggcactggaatttttgtcttgtgattccatgtaggactatcatggtctcaggtacagaacaacaggattttatttttagacataaggaactcaaacctacagtatggccacattcattcatgaactcacagaaataggcagctgaactggctttacgtgggttggaccaccttatcataaaagtctgtctttctgctgccggttagtgtgataaaggaggaggaggctgggtatgaaaagagatgtcggctgtggagattaagagtagaggtagtggacagtgttgccagggcaaaaacaacatggtcagcaagagctttaatgtattctaaaatgcttgttttcaaaagggtgagaatacaaggatatcttgatccatgaaaacataccaaagagatgattgagatgcttatttcttcctggccctttgcctagttccttttgggtcagcaaaccccagttgatttgtagcttgtttgtgaccctgacagcaacagtagcagcagcagcagcagaagcagcaatagcagcagcagcttgctttgcaattatctcctatttttatggtccacatatgtaggtcattgtgtgtttattaaggctgggtaggctcttagcatgtcactggctctggtcattgtgactttctagaagcgaatgtcacagttttcctggttgctttttgctcttaatcatcatctgattggttattcagataagaagatggacatttttgttgtctggacttgtaaaaacccttttgacagtagccgacctagagtccaggggagtattccaatatttcatttagcattaggaaacttttaatggaatatcatagtttctcttctttactttttaagaacttaaagaggtaaaactttcccctgggattgatagtggagtatgtgtacatatacacatacccacctactcacctatatcaacctgattaccactgccaccactaccttgaaataatttgtgacacatttatactctctgcagtgaaagattggttaactgctcgacaaaaaaaagtcttgtggggaattgatggtggttagttctgttgaatgtagggataaccaatgaggttagctttgccttagctcctgagtttctgtatagggagtaatatactatgcttgcatatttcagaacatttcctttgctcaaagttaagtgagactatagttggttctttttgagtcagtgaaagttttatcccaatttgtctctcccatcaagagtcttagtggtttcttcaaaggtgaaatgtacttattgttttttttattttaacttacaaaaaagtagtgggtctttttctacttataagaaagtaatgtcagccgggtgtggtggctcacacctgtaataccagtactttgggaggctgaggtaggtggattacctgaggtcaaggagttcgagaccagcctggccaacatgatgaaaccccattgttactaaaaatacaaaaatttgctctgtgtggtcgtgtgtgcctgtaatcccagctactccagaggctgatgcaggagaattgcttgaacccagtagacagaggctgcagtgagccgagattgcaccattgccctccagcctgggtgacaaaagcgaaactccgtctcaaagaaacaaacaaacaaaaacagtaacgtaaaaaaatcaaacgatgtagattagatattttcaaatttatttctctatgagggaaaaattatgatctgcttatatgtcctgctcccaataaacacgccaaatgatgcttgaacattcttttcttccctgctccatcccacattctattaaaataatttggagaatatgttgtaacatttttaactttatagcaaatctcttttgagaattgtttcttgcattaaattttataaccacatcagtaataaactgtaacttttacctgtttgctgtgctattttctatttactatctttttcttgtattcatcatcttgattcttctcttttttgttctttttttctgccatagtacttcattaagtaattttatgggaaggctacatgcttgatgtatttcctgagtctttgtatatctaaaatgagttgttattgccttcatatttgagtaaaagcttggctataagtagaattctcgggtcaaatttgctttacttcagtattgtaccaagatttgcacactatcatttagtatcatttagtattcagtgcagcagatgagaaatctgatgccagtctgattccttttccagtttagtaaatttttcttgtttggtctataggctttatttgtgggattcagcaattttactaaactgtgtctagacacagctcgctttttacctattctgctatttctactcaagtcaaggttttctttatgtaaatgggattttcttctttcttttcttcttttcttttcctttctttcttttctttctttcttgaactcctgagctcaggtgatcctcctgcctcaacctcctaagtagctgggactaaaggtgtgtaccaccatgcccagctaatttatttatttattattattttatttttgtagagacagggtcttgctattttggccaggctgatcttgaactcctggcctcaagcagttctcctgtcctgatgcctctcaaagtgctgggtttacaggtgtgagccactgctcccagtcaagattttcttataatatgttgaaaatatattttaatctttcattcacctttttcttctttatgaactcctactatatggaattggatttcttctctattcttcatattagttttctttttccaatagttctactacatggagggatttctgttgcttacttcccttttatattcttaatttttgtggtgatagtctgcttttgacttataaatgctctataaaactgaatttggggagagtatttggtaggagtggctctggatatctgttgttcagggtagctagcttgcacttaaacctttatcttttatctgaaatgggaatatatagttatttaaatgcagggtggccatagggtatatacgttcagtcttcaaccatatatgtaattaggggatgcaggccagcagaagaattgcccttagatgcacaggtcaagagcagaccagcaaggttaatctgggtcctcaaggctaatggtttggggattcataggcaggtagcaaagcccctcccttacatgccatacatgtatgccaggtgagggctgcaggagctgtggccagcgcttatgtatattgatctctagttgaattctcaagcccctttgatttcctccctcattgtgttttcatcggtgactttgcttctcaatgacacactgtcaccagcggtgctgggaattgtggcagagtcctttttgttagaaagcataaactcattaaatcacttcagtcaaatcacttttgactgactttcattaaatacccctaacgtccattctaaagagccttgccccacccctcaccctttttgttatgacagttcctggtgtcctgctcaggtcctggtgtcttttgctatgtatctcaaactcactttgctgcctgtgaggagttcatcacagaaaacgtgctctctgatagcattatctaagccaaagaaagcttcagagacagcataatgcgatggttaacactgcaagtgctcttccaggcttcctgggtacacatctggcttcctgcttactggctgcatgactgtaacgtgctgctcaacctttctgtggcccacttaaatcctctgtaaaatgggtgattgattgttgtgaggtttcaaagacataatgcacataaagaatattttatgtaattgacatgtcctaaaacttagtaaatattttcactgttgtgatattttgggctagcaggtctctgtgctgggttttgccatagttgtcactgacatttgatttgcaccatgcctcctcagagttaacccgtgatcccatcccttgctattataaggttcaggattttatatatatatatatatattttatttatattttattatatatttttatatatttatatttatattttattatatatttatattatatttatatttatttatatatatttataaatatataatatatatatttataaatatatatatatttttttttgcagaagaaatactcccacaaacttcctctataaaatgaatgattgaattaaataatcatgtagctctcttacagctctaaaattcagtgccttggtaataaaatatcacttctttgtaatttcatggtgatttataatttgcaaaatacattataacagcacaagtataatttaactaatgaaataaaaatgaggatccaagagttgaaggaacttgtttagatctcataattgtcatgaaagcagttacttatttttaaatagacaataacaaaatcatttcggtgactttttacaaatgagagaatgtggatactcttaaatcctcaaaaagcagccattgtcgtcaataatatatgttgatgtttagtaaccatgaacctccgaggtagttttctttgtaattttttagtggaagattagcacatcttccatcctggcctctagcatattttctgacaaaccccttgttgattgtatcacataccttttatccatggatttggtacgaaagccctattgggcccacaaatctttcggttcttttgtaatttacataatccaatcaacaggggcacagaaacaccttgttctgaaagaaggagtgaaagggagtagaggatgctgacaccaaaaacctagggcactaactcatattttatctctgaatatagtactttgaaaccctagtgtcttaggaaggttttctgttcatagctgatttcacttgatccattcaaaagtcaagcatttttgtactcttactatataacttaaaatatattatagcatggggtgtttataccaatccttgaggggttaagctattattatcattattttatcattaacttctgtgagtttgacttgtacagggcctcctagcctgcaaatttcaaaattgacgtcttttttttttgagacagggtcttcttgctctgttgcccagtctggagtgcagtggcatgatctccactcactgcagactccacctccagggttcaagccattctcccgcctcagcctcctgagtagctgggattacaggcacgtgccatcacacctggctaatttttgtattttttttagtagagacaaggtttcaccatgttggccaggctggtctcgaacacctgacctcgtgatctgcccacctcagcctcccaaagtgctgggattacaggcgtgagccactgcacccagcaaacattgctttttttaataaaagactttcatatactttatctcacttgaacctttagacaacttctgcaaagggaaaggtagggaggattctccatcttgtatcagtgaaggctctggggctctgaggttaagcagcattccaggtttccatggcattaactgtcccaggcagggatgaagctctctgagacgtgccagtccatttctctctccattgccatcgctgctgtattgttactctccctttatattcatttttagtgaaggaaacaaaacagcagttgtcactttcctttcccagtagtttcattatttgctgtcaccagttctgttgcaggatcctctattgtaatattgtcttcagattttaaaaaatgtatctctacatattggaagaaagcactgtggtggaaaatacaggaaaactgtgtacagacctgttaaatggaaatgttttcataatttttagttagttttatttgtattttactaatgaaatttagtaaagatgtcaatgtcaatctttcttactacggaaataagttaaattttgccaactagtggaaaaaaagtttctgtggcatttttttttttaaggaatacaggattgatacaagaatgagagcattcatattataagaaatataagttttgtggttttttttgaaataaaaatttggtttatgagaggcttaaaaaatgaataaattcccttctttcctgatagtttctgtcgttcccttggggattaaaggagtgtgaatctatcctacagccacttcctctctgaactgtagatgacacatcaggatgtgatttggggtagatcaagcctcagagtcgaatctcagtgtctagccgtagaggtggtatgatagtatgataattccacatgtcctgccttctgggctttttgacattcatagcatttctaaacaagtgaaggatttatcttaaaaaataaaattttagtattttcttcattattcgtgagctttaattctttccattagaaattatgtcatccccatatttagagcaatgaataattgcataacttttaaattgtgtatttgatggtatggtgtatattgaaaagagaatgagaaactatcccctgaatagagatttagtgattcaagccatcactttctaaaatatacgcacttcagagtgaaagttcagtgtcagaacttcatagagtgtctggccagctagagttaggtatttcatggagagatgatcaaacaattgaacagaaaatacagcaaccagaagagtttttcactgtgcatgttcagaagacttcatcatttttattatcattttatatcaagccattttataagtagagatgtgtctagaggattgttttcatttccttttagctcattgaaagtcatacagtgtcactttagtaattctcttcttgcccagtggggatagaaaccagttttgggccacggcaactatatagaagtattttcatagagttacagattcattaaatgagaccctctctcctccccttaacacccactgtgtttctgctataatgaggatttaagcaacagtcccaacatgaactagctcatttcagtactagggaaatggctgttgcatgggtttaccacctctgattctgcaacaattgttctttttctgacagcgtcttctacctcctccaggcaggcacaactcttgatgacttgaacctcctatgttcttttttttcccccccagcttgtaaaattatggtaaaatacacataatataaaatttactatcttcaccgtttaatgttctgttcagtagcaatatgatgaagtacattcatattgttgcaactgtcaccagtatccatcttcagaactcatttcatcttgcaaaactgaacctctataccgcttcaccaataaccccccattccactctcagccagcccctgaaaccaccattctactctctgtctctaagattttaacttcacgagcacatggtaaaattgtaatcagattgtatttgtcttcgcaactggcttattttacttaacataatgtcctcaaagtttatccatgttgtagcatatgtcatgctatatatatgtcatgttctgcttatccgttcttgttaatagacatttgggttctttccccattttacctactgtgggaataatgctgctataagtatgggtgtagaaatcactcttttggaccctgctttcagttattttgagtatatacccagaagtgaattgctagataacatggtagttctatttttaatattttgaggaacattcataccattttccacagcagctgtactgtttccattcctcacaacagcacacgagttctgatttctccacgtccttgccgacactgttttttgtctcgataatagccatcctaatgggtgcagagtgatagctcattgtagttttgatttgcatttctctaatgattactgattttgagcatctattcatgtatgtattagccatttgtatatatatatcttctttggagaaatgtctattcaagttctttattcatttttgaatttgacttttttttctttttgagttttgtaaggtctctatatattctgaatattaatcccttatcaggtatgatttgataatactttctcccattttgaagattgcctttttactccattgatactgtcttttgatttttaatttttatgaaattcaatttgtctcttgtgttatttgtgccttttgtgtcatattaagacattcgttgccaaattcaatgtcatgatgcttttgcatatgttttattctaatctacaattttagatgttacctttaggtcatggatccatttcgagttaacttttataattatgctaggaaagagtccacccttactcttttgtgtgtggatattaaattttcccagcaccatttgttgaaaagactgtccttcctgtattaaatgatcttggtgcccttgtaggcagtgacttgaacatatatctgagggtttatttctggactgtctcttatgtgttattatgccaatagcacactgttttgcttactttagctttgtattaatttttgaaatcaggaagtgtcggtcctccacctttgttcctttttactcaggattgttctgcctattttaggtcatttcatattccatatgaattttaggataggtttttctactttttaaaaaatgtcactgggattttgatcgggaccgcattaagtctggatatcatattggttgatattgacatcttagttatattaagtcttgcattctatgaacatgagatgtctaccatttatttatgtcttctttaattcctttctgaaatgtattcaagttttcattgttcaaggcttttaactatttattcacgttaatttctaagtattttgtcttttattttttgatgctattgtatatggaatgatttgcttaatttcctttttgaattgttcattgttgatacaaatgtaagtgatttttgtgtagtaactttatatgctctacttggctaaattcactatttagttctaatagtctttgtgtccaatctttagggttttctacatataagattatgtcatctacaagaagagatgatttaattctttctttttaattttgacacctttatttttttttcttccctgattactctgatgaggacttccagtattacactaaattgttatggcaaaagctggtattcctaatcttagaggaaaagctttcagtcttttatcattgagtatgattttctctgtgggtttccatctgtggcttttgctatgttgagatagttttcttctattcccagtttgttgaatatttttcttatgaaaggatattgaattttgtcaaatgcttttctgtgtcaattgagaagataactttttttccattctgttaatataatatataaccttgatttgtttgttgagtatccgttcgttacaataataaatttcacttggccatgatatatcaaacttgtaatatgctattaaatttgacttgggatatttgattgaggattttgcatcaatgtttattagggatattgttctgtacttttcatgtagtatctttgtcggactttgatgtcacagaatgagttaggaagtgtttccttctttttaattttttggaaagatttgaggataattgttgttagttcatgtatcaatgtttggtagaatttactagtgaagccatggttccagattttttcttactcagattttggatactgattcaatcttcttagtattcatagcatattcagattttttatttgtggtttagtcttggtgcattttgtgtttcttgaaaatttccctgtcatctgggttatcgaattttttgccacacacttgctcatagtactctcttaaatcttttttatttctgtagaattgttagtaatgcccctacttttatttttgtcttttgtagtttgagtcttctctctctgtctctctctcacttcatctagctaaaggtttgtcaattttgttgatcttttttaagaactgttggattttgttagtattctctattatttttctattctccattctacttatttctactcttatctttattatttcttcccttctggtagatttgggtatggttttttctttctttttttccaagtttcacaatctgtagatttaggttgttggtttgacgtctttcttatctttaaatttaatggtgtatagctataaattgcctcgtttgcactgttttcactgtttcccatacgtttggtatgttttctttcatgttcattcatttttaagtatttttctatttcccttgtgatttctcctttgatccattgtttgttaaagagcatattattggctggatgcagtggctcacacctgtaatctcagcactttgggaggccgaggtgggaggatcacgaggacaggagtttaagactagcctggccaacatagtgaaaccccatctctactaaaaattacaaaatattggccgggcgtggtggctcacgcctgtaatcccagcactttgagaggccgaggcgggtggatcacgaggtcaggagatcgagaccatcctggctaacgcggtgaaaccctgtctctactaaaattacaaaaaattagccgggcgtggtggcgggcacctgtagtcccagctaatcgggaggctgaggcaggagaatggcctgaaccctggaggcggaggttgcagtgagccgagatcactccagcctgggtgacagaggaagactccatctcaaaaaaaacaaaaaccaaaaaacaaaatattagccgggcgtggtggtgggcacctgtaatcccagctactcgggaggctgaggcaggagaatcgcttgaacccaggaagcagaggtttcagtgagctgaggtcgtgccattgcactccagcctgggcaacagtgtgagactccattaaaaaaaaaaacaaacaagtatattatttaattactgcaaatttgtgaattttgcagttttacttatgtctatttatttctatttttatcccattgtgctcagagaagatactttgtatgacatctactttttcaaatctattgacccttatttagtttatgggcttattcatgttctatcctggaacatgtcccatgtgcacatgagaagaaggtgtattcaattgttgttcaagtcctctatttcctgacttacctattgtttggctgttctatccactgttaaaagttggacgttgaaatctctattattatacaactgtctatttcttccttcaattctggtaatttttggtttatatattttgatgatcttttattaggtgtgtatacatttacaattgttacatattcttgatgtattgagcctcttattaatataatgttcttcatctcttttttgtcttttagccttttttgacttaaaatctattttctctgatattttgctagtctgctttttgtgggttactatttgcatgaaatggtgttttctgtcctttcattttaaactgtttgtgtctttggatataaagtctcttgtagacaacatatatttgggttatgtgttttaatttattctgccaacccgtcttttgaccagagaatttaattcatttacatttaaagtaattattgataagtagagaattacttcttattttcctacagatgctccttaagttgtgatggggttatgtcccactaaaactgtcttaagttgaaataattgtaaatttaaaatgcatttaatatacctaacataccaaacatcatggtttagcctaacctactctaaacatactcagaacacttgcattagcagacagttggaaaaaaatcacctaatataaagcttattttataataaagctttaattatcttatgtattttattgtatgttctactgaaagtgaaagacagaatagatgcttcaagtatcgtgtttaatgaatgtgtatcacttttacaccatcatatggtaaaaaaattgtaagtcaaacccttataaaatttataagattataaaaccatttatatttattttctatatgctttatagtttctttgtcctttatttcctatataattttttttgtgtattcaattgattttttgtagtaaaatatttaaattcctacctgatttcttttgtgtatattctgtagctattttctttatggttacaatgggggttacatttaacatcctaacgttataacactctaatttgaagtcataccagcttgacttagataacatacaaaattctgttcctttttcagttgttgatgtaacaaaattacatctttatacattgtgtacacaacaacataagctaataatttaatacactcatttcttaaattgtagaaaacaaaattgggcttaccaatcaaattacaataatatgagattttaaatttgtaatttaaaaaaatattagtttcttaaatcatgtagaaaacaaaaagtaaagtcacacatcatgattacaatgatgttagctcttataagcgtctgcctatttgccttttctgacatctgtatttctttgtatgatttttgagttactctgtagtatcatttcttctcaacctgcaggcttcctgttagcatttcttgcaggagaaatctaacagtaataaagaactctctcacctctttttttttttttcatgactggcattttgattttctttctcacttttaaaataaaattttgccagatgtaggattcgtggttgataattttttttccttttagcactttgaatatattggccctctgttttctggcatctaaggctgctgctaagaaaaccggataattttattgaggatcccttgtatgtgatgagtcacctctcttgcaactttcaaaattctccggttgtctttgtcttttgacagtttaattagaaggtgcctcactatttgtctgtttgagttcatcttacttgtacttttttgagcttcttggatgtttatactcttggctttgatcaaatttgggggagtttttggtgattatttcttcaagtattgtccctgccttttctctctgtctcatacttctgggaattccatgctgcatactttggtatagttgattgtgtcccacaggtctcttaggctcagttcacctgtcttcaatcttttttctttctgattcttagactaattaatttactttgacctctcttcaagttttctgattctttcttttgctgttaaatctgtctttgagttcctctagtgaattttttatttcagttattgtaattttcatttccacaattgcttttttttctttttctgtattgatattcccattttattcatgcattgttttcttaactttctccttgcttcctttagttctttcagcatgtttaagacagtagttttaaagtcttcgtcaggtagatcccccatcaggtcttttttagagacagtttctgttggtttatatttttgttttgaatagaccgtgctatcctgtttctttgtatgtcttttgattttttgttgttgttgaaaattgcatatttgaaactaataatgtagagccctggaaatcagaccttttctcttccccaaggtttactgttaccgtttgtattttgtggggttattgttgccagtctctgtgctaagtattagctttttttgttaacttgtggtcttaagtattttctgagcctgcatgtttccctggttatgtgccatgactttctcatttcctctgttgttttcaaatgccctggttatcaaggtctgtctcccaaaatgagaaaaagtaaaaaataaaggaagaaaaaaaaaaaaaggactggccttttgagtcccatggaagtcacttcagctggagtgagaggggcaacactaatgatagttgcccctttttctttatgtgtgtgattaaaagcagcaattaatgttcagtccacagatccttgatatatggaagacaggtcctttttgcccagcttggatcatgtaagctgtatgcaagctgcttcaagtacatgtgcacagatgcctgccaaggatctaagaggtggggtataggtagttgctattgtgctgagatgtaaactttacctaaattaaccacaacttaccatctaaagcttccctccagaaagtagactcctttaatagactctggacttccaaaataagttgttgatatagatggtggcagtgcaatcgttgtctaggtggaaagacagatttgtggtgcctcctgctttgccatattctcagaatccctttcacttccttcgatttttactaagcagaactaacttccttaattcctctgccatgcctgcaactattccttttctcccttctttaccaccccctcctcctttctccctgtctctaaatttaggttcccactcagagttctcactttgaccttccgttttctctcagtagatgtcactactctaataagatcaactttgatctttctttatctaattatttgaactgcttgtgacttggtactgtgttttcctttgacaagttttgtttcatttatccatgagatcttttcatagataacacctgccttttcactttcaatgtatccctaattctactcatcatcttactcaaaggcttacattctgttagacataccattatattttctagtcttgccaactaaatcgtgttcattgatgatatatcttgctttctttgtatatctatcaccaaggcttacaggattatttcaatctctttattttcttgcccatcatcctagttcatatcttctgggttacaacctactcattgccttcattctatctttttcacattccaactgcatatctgtaaccacttagtggtttaaaaaatattattttcttcctttggcttttccacattaaatttctcctcttggtttatttttcagagtactctatgacctacctcatcctatgtagcacactgtatctcccactgtcctttttatacagtccttgctcttttgaagctcatatcgtcattgtcagcttcatatgccaagccaatttttcttgtgtctttctcaatacctgatgaaccctcatatcctcatttttagaagcctaactctactattttactcatacgtgtctgacaactggatcatcttgatctctctcttctctgcatcctcagtcttttgattgagtcatgtgatgtggtggcatgagcccagggtttagggctaagaaaccctgctctgttgcttatcactgcatttcccatctttacatgcaaaaatgaggatattaataacaatttttagaaggttattttgaggactaattaagataatgtagagtatccaacaactgctggttcagagtaaaggctactatgagtcagttaataaatagatttattaatgctgtttgattttttctgccacttaatatatacccttttgtggggtaatgtaatcattgcatgtacattaatcttgccaccaaactttattttataagccagaatcataaaataacatgggagacttgtagaaattatttaaaatcacaaatcgtagagcaccagatttgacatggtcctaacccctctgccctttcttgtgatgaggaaactggagcctaaatttcttaagtgaactgttcatggtgacacagttactaggagagctggtcctaaccacaactagagatttctggactcccaggcctctgctctttccattaccttcttgttcatttattttagcaattgcctgaaggcaggatcacaacccatatttctgtatcacccataacctttattttcatttcattttattttttttgagatggagtcttgctctgttgcccaggctggagtgcagtggcgcaatctcggctcactgcaagctccgcctcccgggttcacgccattctcctgcctcagcctcccaagtagctgggactacaggcgcccaccaccacacctggctaattttttgtatttttagtagagacggggtttcactgtgttagtcaggatggtcttgatctcctggcctcgtggtccacctacctcggcctcccaaagtgctgggattacaggcatgagccaccacgcccggcccataacctttattttattgcgagaagatagaatagctacttgattgatatttgtggcttgattgatctattctttcttcgactgtgcaataggaattctctgggaaaggactatgaagtctgtatacttatcacccttttgatgcttttggggttgttgtaagcatgcaaagggttcattgtgcactgcttctgtatactgactcagggtggtggggagaggaaatgggagaggaagttatatacatcttgagcaaatcaagcttttctatttttagtccttgctactgtttggaaagtacagcctctgttcatggcagtctggcatgtgtttccttagtgccatttcgaaagggggaaaaaataaatatgggaattttttttttttgtagtgaaaatagttactcagtgaaatcacataagtttcccgtttttctcttgatgaaacctcaaacccactaggcacagattcctcaacctcaactatgcatgtgaaaggctcatgcagaacaggagaccagagtcagcaaaaccttgtatagcaagataagctgtggtgccccagagaagcgcggatgggtggcggaggtggggaaggcagggaagggaatggtgatgttctttcatatttagtggggaacttggccaactaccagatcgttgccccctggaaaaggctgaaacctgaactaagataaagagacacatagctttgcagctttttgcttaagctgttccttttgcttcagtttctgtccttggtaaaagtttccctgactgctttatagctactcccccaattcaaataaataatttttctttaatagttgtgatggcatttgggagatttttccaatctaaggctatatcattaggacacgataaagagccttttatgctagtaaataaaatgatttgatctgtatttagatggattgctataacatagtggtactcaagtgatcagaaatggtgatgacagagtgtcttggagtcaccttcaggggtccattgaggcagacaaggaccttaaccaaggtggtggccatgaccatggagaaggggaacaagaatcaaaagcaatttggaaagagggggcttatgggaaagagaagagtccaggatgcttggcaggattgtgactttcttcagggagaatacatatccttcctgtcctagtatgtggcaaatggaagaatcctttggaaaaaaatgaggactttgaagcaggtgtgatgtgaatgttactagaggaaatgttgataccaatgagcaaatattgccctttgttaatgaaagggactatacagtctccagacataaacagctctgcctagacaaaattgtagcagtagggtgagaataatgcattgctataattaatgctaatttgtggatattgctgtattgttgtcattgttttttaattgaatatgtattaagctccaacagggtgctatgaataatgccaacttatagttgatttatgagaacactcagaagactttattaacaccagtaaatggaaactcgcactccttcgaggtggtaaacgtctttgccatttcgacagatgaggagaagtgaagtagattgtgttttctctgttggcactgcgggtgagaacacagaaactgtcgaatgagagaaaagtattttccttgtcccctggaattgggttagaatacattagtaaagaattctttaatgtgttcagagttgtgggattttaattaaattgttccagttattgttagcacttggattagcaactggcaaccaaattctaggccagcagatttcaaatttagcatggacaagaattggggtgaggccgatgggtttgttaaatgccaattattaggccctgccttcaaaggtttagatttggtaaatctaggagggggcttaggaaaatcttatgttcatggatatcgaaggtgcttctgtcctcaaaggttgctagcttcctttcaaaactccagtattttcttattttaggacgtatctttggccaccaaaatctagcttcacctgagaccaagggctttttatttaatagctgcaaattctcttataacacaccaagtataatcctgtaatcctcttttatacacaacataccaccagaaaacatgtgcagaagacttaccgtatgcttagcattctagtggacacatgatttctactaccttatttcacctggtctccaaaatatccctgtggggttggtattattgctcccttatttcataagaagacactaaaactaagagtatacgacttggtcaaacatcacatccagtttaatcctttctatcttaacctggttaggcatatattttactttaagtttgaacaacaggtgggattctttttggcactgacagagtttgcagttgacagtagagactgtaaactcggcttaagtggacccgtcccataaagaaaaacattcacattggaacaagggagaggtgaaaaggaaagttggaagtgagtaattcaacttttcatttttttttgtccccttccttccttccttccttccttccttccttccttccttccttccttccttccttccttcctctctctctctcttttctttttttttttttgagtctcactctgtcgcccaggctggagtgcaatggcatgatctcggctcactgcaaactccgcctcctgggttcaagcgattctcctgtttcagcttcccaagtagctgggattacagttgtgtgccaccatgcctggctaattttttttttgttgtttttttttttttttttgcatctttagtagagatggggtttcaccatgttggccaggctggtctcaaacttctgaccttgtgatccgcctgccttggcctcccaaagtgctgggattagaggcgtgagccactgcaccgggcctgtctcatttctttaatacgaggtactaaactgtcactgagtaaatagtagacatttgattattatttgactctgaatattttttgaaaaaaggaacatttcataagaaagcctgaaatgagacatgagcagaattctggggtatagaaatgatttttaagttgagacaagaatagtgaagcttgagacgacattattccttgcctcctttagactttcttcagcctccacctagcaaagtaaaagtcttgtcatagcagtctgttgcattgtattccctgggtctaaggcagaaatgtgtacgtgctccaataacccttgtttgttgtgctgtggaatcacgttcatttctgattaaggtgaaatcagtagctttctgatacggtctctcactcactttttatcaatggcaacctttttcctaaaaataggaatttctgctgggagtgttttaatataaattgtctgtgctcagcctgaaatatgtgtgattcataccatgtgtttgttcccacatcaacactaagtcccaagatacaattacccctgcccactctctccttcgtcatggggaatgtgtttatcctttagatatcagcaccttgggtaagagccaatctccttatatgccttggtttgcacacctgcattgtctgaccacagctgaccctttgagtctgctcttactctatttttaccttaaagaacactcgtgtttgccaagtacacttgcacattgcagagttccttctatatctttatgctcatgttgtaaatatgttaaatacttgttctccatttaaggccttctcaattctgtcgccatatagctctctctgatttctctattcagctactttctctctttcctctctctcattttgcttttttctcgaacatcttgtgtgtcttacctacatgtagtctgccttctaatatggacatttgtggataaactagtttcttcaatgcaactgtaagctcttggcagagaacccctgatccattctctttccctccctccccttccttctccctctccctcctttcctttctttcttccctccctgcccccctccctccctccctccttcctccttccttcctacctgcttccctcctttcttcctacctgcctccctccctccctccttcctttctacctgactctctccctccctccttccctcccttcctcccttccttcctcccttcctccctccctcactcccttccctcccttccctccttcctttccctcccttccctcccttccttccctccctgccttcctccctcccctctctccctccctccctcccttgtccctcttgcctgaacttcatatcagtgtgtcttgaatatttgaaaaatatttataggaaagtgaatgaaacctatcctaaatggagaagtagatggcaaaaaagggtattagagcttggcttttcaattgtaattgtagccatgacctaatttttggtaatctaataggcccatataatctctgcttggtgttagaagggaagacctttcaccttttgtgttttcttcctaatgtcatgcaaagtgctagagctttggagcaaaatgtttgatttccaaattccaattcttccatttactgcccgagtaaccctagaaagttctctttttctctctgatccttgggctatcctcttttgaaaacaggaataataacatctactaatctctaggattgctggaatagctcgatgagatcgtatatatgaaaatgcttttctaaacctgagcacttctctgtgataatggccgtacagagggagctatgatattttccctcttgttttcccagtagtgactatgtcccaggctgtgtgcagtggactgggtagctgcctagtaatattgctggcttgtaggatatttcctgttttatatgttcttaagaagatcagttgaaatgtacgagatgtcgttttggaaaagatgtttcacagtgggaggtgttaaagttttagtcctacttcagccccttcactatacaaactaccttacctttttgggggaattgtattatctttaaatgaaaatgatggaatagcgacgtaaattccccttctagttctaatattttatgagccttatttccattttctatgcttatcaactataaatgattctcttgcagttgttcaaacatcttttatctgcacatcctcatcaatggtatttaacatatagaatcagaaccacaaatgtttgaagaaaattctcggccagacatggtggctcacacctgtaatcccagcactttgggaggcctaggcgggtggatcgcctgaggtcaggagttcgagaccggcctggctaacatgatgaaaccccatctaaaaatacaaaattagccaggcgtgttggcacgcacttgtaatcctagctactcgggaggcttaggcaggagaattgcttgaacctgggagacggaggtttcaatgagccaaggttgcagtgagtgccattgcgctctagtctgggcaacaagagcaaaacccggtctataaataaataaataaataaataaataaataaataaagttcccaccctctgtacgtttccatggcatgacgctttgctttatatctctgagtacatgatatggaatatgggacatgggaattgaatacttttttatggtttccaattttggtaacatttaaggggtcaaacaagagttcaagaaaaaaaatacttgaaaatgatgagctaatgtataaagttaacatcacatttctaactatttgaattttggggaatgtgagaaagtggcttttgaaatgtatcatgcctgagcttattaagcctgtgttaccaaaatgaaaaataagaaacatgtcttccttgaggttttaaaaaacaaaatcaatagcaaaattacctgacaagttctgtttgattcataaatccacacaattgttgcacatctccagccccctcaccacatatgaaagttttcttaatgtaaaagtaaaccttttctcccctacctctaaaaacttctgtctaccaattttattatttcatgttattttgttatgcaaaggattcctggaaaaatatccatgatcctagatgatcttatggatatctttataggtatttcaatgtagaaatttcaaataaatgtatttcccttttatgcacaaacacagagttcagaaaagacagttcatttagagtttgctaaactgtgtgtgtggactaactggtaaggtgacgctctaggatggcacagcttgcctagataatctgtagcagtggtttttaaactattaatttcttagaattgcttcaggaaatattactaaaggagatgggggataaagcagctctgtctgtatatgtttcatacaatgggtttccgtgtctgatttcattttaccaggggatctgctgcttaaaaagggggtgccaaatatctattttactgtcaaatagttcatcttattgtgattattcttagagttcctgttttattgatgaatagataatatatgtattgttccttattattatctatgcaaattgacctttattttaattgtaaggggttactttaaaaatatattatttatattatttttattttataaggattggaattcagtagaaatcattcaacgagtaggtaaatattgtgaaaagtgaggggtttttgttgcatatttagttttgctttcttatttgaatagaacagtgaacagtgaggctacttgtgtatacccaagttcagatcactttaaccatgaccctgcccttacttataaaagagttggcttaaactcggagttggcctaactcttacgggtttagtctgatggcttttgaacagcaaagatagtgacaggcaagttgtgaaatgtcattatagatctatgcagtattagaggttaaaaaaatagaaaacgacctggaaggtgcataccctcatttttgtagaggtaaaagttgagttccagaaagtcaaagaaactgcttgataatatcagcgggacttggtcttgtttaggctgcttcagtagggctgattgtgtgaaacagaggccccctggagtagcgctgaatcatggagtttatcttaaggatggatctgaatgagatctgatatcaggaagctcagggtcagggcagatctgtggctgaactcttccatctatttttcttctcattgttttttttccctctctcccttcctcttttcctctcctctccattcctctgcttctctagtgttcgcttgttcattgttttcctccacccaatgatagacttcctacctcctgttgtatgtttggattgttaataattaaccatgtacatcatctttttggttgatcacagccatagctcatccctgtggcaattttttattttttattttatttttttttttattttttgagtttcactcttgttgcccaggctggagtgcagtggtaagatcttggctcactgcaacctctacctcccgggtgggttcaagtaatttttctgcctccagcctcccaagtagctgggattacggttacccaccaccacgcccagctaaattttgtatttttagtagagatggcgtttcgccatgttggccaggctggtcttgaactcctgacctcaggtgatcctcccgcctcagcctcccaaggtgttgggattacatgcatgagccaccgtgcctggcggcagttttgttacatgtttttcagtccaaacgcataagagaaggagatttatttgcccatctaatctccttgtcactgtccaaaagttaggttcaccagcctatttatggacccttggttctgtgggcctcagtgttctgaaatggagtcgcatggttgaaaacatggctgttttggcaacaaagaatgggggcaggaccatttcctttaaaggagatttgggttggccaaacattgctaacactgggtgagtgtgttagggctgaaaaggatgaaataatgtaaattgtgaggaaaaaaaattcaagcatttatcaagcgtagcatttatgttctatgttgacgtttgatacggcttggatgctttttccctccaaatcatgtcagaatgtgatctccagtgtttgaagtggggcctaatgggagatactcgatcacagaggtgaatctcttatgggggtttagtgccatccccttggtaatgagtgagttcttcctctgggttcacacgagatctggttgtttagagagtgtggtacctctccccaagccttgttcctcctctcgccatatgacatggtagctccctgttgccttcattcatgattataagcttcctgaggctctcatcagaaactgtctggatattgacaccatgcttcttatatagcctgcatagtcatgagccaatttaacctcttttctttataaattacccagcctcagctattgttctatagtgatgcaaaaatggcctaatgtaacgtttttgtgctttatcatgaaaaactcttgtcttctgttgttaccttatttcttgtttatttaatgctgtgttctcagttgtcaagccagtattgcacttcagattatggaaatgtattcccccttatgaatgctctagtgtttgctcccaagacagcttttgcgacaacttttcccactgcctttaacatgtggagaagatgtccttctcggatattaataagacttgagtttaggcctggttttgcatattagaaaagttgaattgtatttctgttggccattagataagaaggattttagggaaggggactgtttttgtttttaaatttgtgtctcttccacatagttttacaaagagtatcaaataacatagtgaatttgatatctctaggcaaaagtgcaagtgatatttttcagtagaatacatatatataaactcctcaaggttgggtatcatggcttttttacactgcatactacttagcataaactattttctagagcagcatgggagaaaagccatccactcaaatccatcatgagagttaccctatgaacattggtgtcatggaaaattagacaaagaggagtcagttatcaagttagtgggttatttgtaagtcctcctcccctggagaagggtacatttggggagatagataggtaaggtttttggaaagctaaacacttcaactgaatgactgggaaagaggatacacatcccaataggaatgcattcattttttccctaacttacaacagtttgtatctctttccataaaatgatatttctattagataaaatagatcatattttctgcaattctcactactgaatacggcctgtgtccactgaacattaccaggatccgtttggtgaggctgctcatattactatacagcatgagagattatattaaatagaaatgttactgtcttcatttttatttttatccaaatacctcttagctattatttggtgtgtcaattggtattttcatggcatcattaaccatatatatgacataatataggttgtttttaagggaaataaactataaattcactcagtacccacccttactccccctgccccacacacttaaatgttcattgtgttagaaatccacttagaaaagtcattctcaaagtgagaacacctcactttgagaatgactcagaccagcaccatcactggggatgttgagaacatccccataccagcgccatcactagcacctacgaacttggtagaaatgtaagttcttgggcctcacccaagatgtacagataagaaactgtggcaggtacagcctggtaatctaaggtttaataagtcctcctggtggttctgtataggctaatgtttgaaaaacactgatctaggattgtgttctttatggttaattcctggcacccttacacatgttcagatgcatagaagccccatctactgaagcctctcagtaacttagttttacttttgatcaaagtactttataaagtcacatactcaattgcctgactattaacagaagcatttattttgagactattgtcaaagtaacaattaaatagctagcatttattgaatgcttattatgtgaatattacttgacatgcataaacctatttaatttttacaactgcatgagggacccgagagctcaggtgaattgttgaaggtcacaaagccagcaattgggagatacaggtattacagcctgactccaaagctttcaccagtattcttttttattagggatactttgaggaaattacttaatacaaatgattatagacaaataaatattgattgtttccccaatttcatcaaagacagatgatggaaaaaagattgatctaacttacaacaaaatgattacactttcaagagaaactagatagaaatagtttggatatctgtcccctccaaatctcatgttgaaatttaatccccaatatttagatgtggcctagtgggaggtatttaggtccctcatgaatggcttggtgcctgtatgagtctgttttcacactactaataaagacatccccgaatctgggaagaaaaagaggtttaattggacttatagttccacatggctggggaggcctcagaatcatggtaggaggtgaagggcacttcttacatggcggtggtaagagaaaatgagggtgatgcaaagcagaaacccctgataaaaccatcagatctcgtgaaactttttcactaccatgagaacagtatggaggaaactgcccccaagattcaaattatctcccccttgttccttcccataacatggggagttatgggagtacaatttaagatgagatttggatagggacacagagcaaaactgtatcagtgacctccccatggtactggtcatacagagtgaattctctgttagttcataggacagctgattgtttaaaagagtatagcacctctcctcgctctctcttccgctctctctcaccatatgacatgctgcctcccattaccttcctccatgagtaaacgctttctgaggccctcaccagaagcagaaggcagctccatgcttcctgtacagcctgcggaaccatgagccaaataaacctcttctctttataaattacccagcttcaagttttgcattatagcaatgcaaaacagactaacaaacatagtgtgttttgttacttaaaaagcacacactttcaaaattcctttagttatcaccattttcccccactgatattagaaagaagagagtaataaacattactgaccataatagaaaaaaaatacagtgaaattcctgttgtattattaaatttaaatgaaactaccattgaaaagaaaagttgtatgtaaacacaatgtaatttttgtattattagcctcttaggttttactaaattaagacagttttatattcctaagttatcagggaaagcttttctaattaatcacaaaaggaagctcaagcttgggtagggtctgggaacctctttgttttccatatgggatcagtggtaagacattccttgagctctgtgaagcacagttgaaaaaaataggattatgtggttactttctcaggtctgtaattgagcagtcacattcaaattccggctttttgaactcacaatctataatgtgtcagtatggttgtctacctcagagattctgaaggttgttgaagattagttcatggtcatgtatgttttgagtatgacgctgggcattggatctaattctagtatataaacatccaagggtggagactgtttcttaattaaatagaccattccccttggccttttgtttcctttaatatcctggataagattttcctatgtaacagtttttacttgatgattaagtttctgatttttttttcatagcacaggacttttcagttagtcctgctcccctaccttgaaaccgaaatgaatactgaacaaataaatcgttaacgtattaggcaagatatgtttattttcatcccgtttcacaatcattaaggccatagttagttcaggcaaagatcatctatggacactaaaaccactgggtgggtgaaaggtttttgactagtagaatactcacagtgccccaaaatatcacctcacagattatttttaatttaaaaatcatgcagtcatgcttaaaatggtgaaatctggtacacactaccttaatcgagtcatcaaactcagcatcaccaagcatgggccaaactgacccttgagcttcctgatgggatgcagcagaagggatgtggcctcacgcatgtgatattcctgcctgacttatttaatctgaatccagtcatcaagaaaaaccagattggttggactttttataagacacctgaccagaattattttaaaagttggctttataaaaatcaaaaatcagctaggagcctgttctaaattaaaagagaataaaaagacatatcattttatgatgtgatccttggatttggggtgaaaattaacagtagataaaagaacactactggcaccactagtgaaatgtgagtatgggtgatattagataatactgtttctatgttaaatttctccagtgtgagaatggttttgaaaaaattagaaattcttaggagatgcaaactgaggtgcatatgggggatgtcggggggtggttttgcaacatcttacagatggttcaattgcaacagcaaatctaatttatgtagacagaaagctagtgtgatgaaatggtggccactgatgaatctgggtgaaggatgggtgagtggagtttattttaatagttgttcaacttctctgtgaatttaaattttttggatataaagaatgaaaaagtaaataaatacaaatgaatgctctttcataaccaattgctggtactcctcgtctatcacctgtagttagtgggttagtgatagttggcctgaaatatgacccattcaaaatcagactcttgataatggcctaagttcatttcattcacacgctgtacattttggttctgggctatttattggactgtctttatgtacttacagtgggggagtcatcatcctataattctgctggcagcacttattatgatttgtcaagtcataataagtcccaactgtggtttggtgagctttttatcacatatgtattcagataatgcataaaaataaatataaaaataacatgttcgaatggtttattcataggatttttgtggtccttggtaaagggacgctgtcagtagacacctttggtgccccacctcgcatcttcccctcccaccttcgtgtaccagcagctgctacagcgatcagctctgcacaggtgtgacctggtagcacttggcttcaactgcaacacctttcactcactttctgtgccgggccttctctgcaaccatttaacttctgagacttgtgagacttattcacaaccaggagaacagtataggggaaaatgcccccgtgattcaattatctcccacacggtcctgcccacaacacatggggattatgagaactacaattcaagatgaaatttgggtggagactcagccaaaccatatctccttccttctctgcttaactccttctagtccctcagtactgtttctcagaattgattcccaaaataaatggccaacatgcgagcttttctcacaggcattgtttttcttggcagaacacagactaagacgatgtaatctttgaaatctctctagtgatggttaaagagtgtggggattgttataattacattaactactttataaaagtttgtggtggtaactagaaaaagcattagtcaggagaatcttccttgttgctggcattgggaaggtcatttaccagtcaggtaactagcacagctacaaagatagggagttaggagaaagacatgttggtaagtctataggattctgttgcttggttataggactttggatcctggtatctactataagggattgagagtagcaagatcccctaaatcgaaaggtaaatgaatatctacagattcgtggcaggacttgggcaggacaacagttatttgaactgagatataaaattgagactcaagagtgaaaaaaaggcctattctaattcataatggaattgaaatgtaggagtaaagctactatagtatttgcacaatcttctcccctctcaccccacgctcccctgttatccagtttttgtgcaaaatcacacagcattagactggaacttgtgataaattgcatcaacctaatttgagaaactgaaaatagggagcagtctgaacttagagggtagggagaataaggaccctggaaactaattgatgtcttacaagcacagactggttgcatatcataattacttgttttattgtgtagttcagggtaattctgtgacttgttgagtctcagtggttagatattgcagtgacttcaggcatagtcagttgatgtactttctgcttcagtaaagtacagatgtagaagacctgattaaatcctgtctctttactaataccccaagggaacacttaatgaatgatgcttccctcaagaagaagaataattaacaatagctatattattcatattaatttatagttactggttgctataattaatgctatttaggaaaatcatcataattatagcactttacaacttacagagtattttcccatccattttcttatctaaatcttataacatcaccctggcttagatagaacatgtgatattctcttcattttatagatgagaaaactatggcccagggaaagatttaagcagacaacactctaccacccttgccaatatattggactatctaagagtatgtggaaatacacttaccaaatttatgtctactataatattttatatctgcgcacaagaggatcaactttactcagtttttagttgcattccaaaacaataatgtcctgtctttccttgtaccaggacccccattacccagaatgttcacatgaattttaaatgttaaatggaatttttcttaataataccacagtgtttcatagttattactgccctttgatataaacatgaaatctcctctgatagagggattagcaccttgaaaacatctgtttccagtatacagacctgctggccttaaacagtttaatcagactggaaattcagactcagaaaagtctaaatttcaaccaacctgtcatgtcactctttttctatttttggctatgacaagagagttgaagaaaatctatcaatttcacaaggctagccttcaaatctgggccgtccagcttgatgatacacacatagttaccagtgtgagcgtgtgtgtgcacacacagatggacactgaacctctttggttccgtttttatatcaaattctagagtatccactgcttattgttgtacttctaactgtgtttacccaaaagatagtgctatgagaaaggttactgcctgtgtcacagtctgtcattattcactgatttatttattcaaaaatacttactgaacacttatttgggctaggtcttgaaagagagtccaaggaaacaggaacaaaacagacaaagcttctcatgaagcttatatgttctaggggagagactgaaaataaacagaaaaatacacatggtggcagatattatttaaaaatggatttaaaagggtaggggaataacatgacgtgatgtagaggggtcataataatacatccagaaggagaaaatcataaggtggctgttttagataatgtgataatatgaaatatatatatatatatatatatatatatatatgtgtatgtgtgtgtgtatgtgtgtgtacgtgtgtgtatgtgtgtatatatatatgtttgagacatatatgtgtgtgtgtgtgtgtatatacatatatgtatgtatgtttgagacagagtctcgctctgtcatgtaggctggagtgcagtggtacgatcttggctcactgcaacctccgcctctagggctcaagctattctcctgcctcagcctcccaagtatctgggattacaggggcctgccaccacacccagctaatttttgtatttttagtggagacgggtttcaccatgttggccaggctggtcttgaactcctggcctcagataatccacccgccttggcctcgaaacctgctgagattacaggcatgagccaccgcgcccgtcctgaaatccatgtttaaagagggctcacaaacaaggaagccaactgcctcttgaagtaggtttggctccaaggacctgggccacaacttcatagacagttgatgttactgtgcttgagagaaatcaggcccaggaaggattaactcaagctgactaagttcccaaaagaatgaccaaaacaccagatccctttatgtttcttttacacagatagttaaataagctccaagactcaggtaaggtggtttggtgagtaagctactagggcatacggaactagtggtcttcacaggccattaccctttacgcttgcttcaacatattcactaaaacgacagattgacttcaagggttataagatttagtgctagcctgtcatggcacgctacttgttgttgttactgaagatattctagtttcttggttggttaatgctttttctaaactcttttgcagacactagatactctcttgatattttacgtccttagacaagtccagtagaattgattagattattgtaactttccactattgtattgccattgagtcttgctgaagatacactttggtctcttaatgaagttttaagagcttcttccatattcatatatgatcattattaaattgtcactttaaaaggttatttttttacttcaccctgcctccaaatactagggtcatctcactttataatccagacagattctttgcttctttttcccaaacctgatcataattcctggaaacaccctgtgtcgatgttgttgtcctctactctcctgttgattctgactgcaggtaatacgaggttctgacataggaaatccggagatcctgacttcattgtccatgctcactgccacatgcttcccctgcagccccttggcagaaccctaagaggtctctttccagttcatgttctaggtgcatctcttgggtcttgccatctctcgcacacatgcatacctaataccccctggacctgagacttccaagcactggcatgctccaatgtcttcaagtgctgattcctctttctggaatgtccgtgttccttccctgctccttgctactccaataaatattattctaggcagtggtgtctaaacaccaagtgcttgtgagctctcttcagctggttctgttctttaggtgcaggaatggagacatttattttcctttacttgtatacttattttaaacaacaacaacgacaaaactgctaaataagtgtgtgacctgagaaaaatcatcttttatttttcagttttcatatctgtcataaagtgataattctatctcagcctacctcactgagattttatgaaagcttaattaaaaaaaaaagaggtgcagaaaaacttggacaaagccacattataacttgagaaatttgaacttataatgatatcaagggaaatttcctttgttaacatgtctgtgttgcttccaacaggggaatcccggaggcaagacacttgaggagaggcgctccagcctggacgctgagattgactccttgaccagcatcttggctgaccttgagtgcagctccccctataagcctcggcctccacaggttagtgcagcccacaatcatctccacacagccattcccagatattctactcttatcagaaagaacatgctgcacctgagagcttatttccccttccttccttccgtccgtccttccttccttccttccttccttccttccttccttccttccttccttcctctctctctcttctttctttctctttttttttttttttgatggagtcttgctctgttgcccaggccggagtgcaatggcacaatcttgtctcactgcaacctccgcctcccgggttcaagcaattctcctgcatcagcctcctgagtagctgggattacaggcgcctgccaccacacctggctaatttttgtatttttagtagagaccgggtttcaccatgttggtcaggctggtctcgaactcctgacctcatgatctgcctgcctcagcctcccaaagtgctgggattacaggcctgagccaccatgcccggcccttttattctttcttgatcttcttagagtcaatgatttaagttgcctttttatttaatatcaacatgtattagtcaactggcagaaatttcttaaattgactctttgagtactttctttaaaaataacacaacatcatacaaaaatgttatataaaaaagtaaatctcttattccattgccttgctcttcttacagctttgtctatatggatattttgttacatgttgttatagttttcacaaatatgacttagcttggctatgtaaggttaaggtgaagggctgtgtcttttgcaaggaaattagttttgttggatattaaggtgattttcattatttttgtcatggttttaaataatgctacaggggacatatttgtgtatattttctttggggttatttcctggcctcagatttctaggagtggggttgctacattgatgaatgagaccactttatttacttttctttcctaaggttgtgaatagttgatactggtaccaccagttagtttgaatatatcagtttctcctcaagttcactagaatgtgatggttgcaattaatctgtgttttgtaagtgcaaatggtgccttgttagtttttctttgctttttaatttttttatttttgcctactttggagcttggctatttttcagcatcttcacttaatatctgcattccagaagctgatcttccactgctagtgatcattccctgcctctctaaagtcttgaaagggttgtggcaaatctgtttcagggcttccaattcctcagaagacagccatcagaattgtagttgcaaacgctagagaagcagtattgtcactgtgctgtttgactcttgcgtgacatttgtttgactaagtgagagtgcatagagcctctgagcctcactccagttcttgagtggcagcttctgtatttacagtggttcctttcttaaattaagaaccagtcttgtttctctgctgtcagttatttcaatacttaactgctcataaggtggcagcactttcttcttcttcttttttttttcttttatgagatggagtctctctctgttgccaaggctggaatgcagtggcgcaatctcagctcactgaaacctccacctcctgagttcaagcaattctgcctcagcctcccgagtagctgggattccaggtgcctgccaccacgcccagctaatttttgtattttagtagagatggagtttcaccatgttggccaggcttctctggaactcctgacctcaagcgatctgcccgccttggcctcccaaagtactgggattacaggtgtgagccactgtgcgtagctgctgtcttctttagatacattccctgtaccttttcttaacatataatggaattgttagccatgtgggattcatggcaaaatatactaccacttagctcttcctcactgaccctgctcttggctctatccatcctgtgagcagtaaaaatatactttgtccctgtaaatgtgtactgaactcatctgtagaaggcactgtggtcttttgggggaaccgatgaggcaaaaaaggtggatagttgagaggaagagaaataggactccgttgtaatcttctaatagcctgtaatgttatatgtgaggatatggcctatactgcaggagcacaaagaagatagtgatatattcttctgaaggtgacacagtctgataattcttatcaaaagacttgcattttcatctggaggggtgagtggaattgtatcgttcgagacagcagcagggagtagcctgagccacagggctgcaagcaagcaccaaggctgcatttagagatctgtaagcaaccagatggctgcagatgaagcctttgaaggcttggagtagaatataggtctgggaccagcctggccaacatggtgaaaccccatctctactaaaaatacaaaaaatagctgtgcgtggtggcgcccgcctgtaatcccagctattcgggaggctgaggcaggagaatcgtttgaacccgggaggcggaggtttcagtgagccaggatcacgccactgcgctccagcctggggacagagggagactccatctgaaaaaaaaaaaaaaaaaaaaaagagagaatataagtctggtagtttcctacagacagcgtgtagacacgtttaaatgccagattatgattttaatctgtcttttgtagataatgggattatttgaaggttctcaatcagggaaatctaaaattcattctgaaaaaggaacataggaaataagaccaactctagaatgatgcaggaaatgagcccaggtcagaaaaatgttctccagcaagccactcttcatactttctgaccattgcttgatgttcagcaattttttttgattccacccaagcaaatgccccaaatctcatctcatatctgaagacaggaaggccactgactttgccactggactcagcagtatcatgcccaaatgcttttttgtgctccctttccttttttttttttgtaatgggttttcactctgtcacccaggctggagtgcagtggtgggatctcggctcactgcaacctccgcctcctgggttcaagccattctcctgcctcagcctcccaaatttagggaggatagcaacagtgtttctggctgcagtaaatttggggtaatgactttagcttacatctactttataaaaaatcctccatgacactgcatggatttatgcaattgaactaccttaatatttgaaactaaaatttctaaacattttaaaagtgtttgtcagggagtagttttagaataacagatgagaaaagttcagacatattcctgtagtgaattgcagataaaatgtgagcatagagtatcagagctttagtgggccttccaggtcatttagccaaacttacaggtgtgtgccaccatgcccagctaattttttgtatttttagtagagatggggtttcactatgttggcaaggatggtctcaatctcctgacctcgtgactgacccacttcggccttccaaagtgctggggttacaggcatgagccaccgtgccctgcccctccccgccccccagctttttttttaaacggagctttcatttaaatcttttttttcctcccctaaatccttataacctaatagacactgaggagatcatgctttgaggtctattgtttaatacaacctttattcttgaaggttgtgtctatacatgcctctcataaaccattgcattttaataggtttattctgcagctacgttttgtttgaggaatctttctgagcacacaaattcatcatcactgatatttggacagtactgattgtgaagcactttcacatatattctcacttgagtgagatatagatatctcagttctgagatgtgcgtgatgtgctcctttcagggatgatgaaactaagactcaccaagaagattaatggtttctccttggccatatgtttgagcactgcgtgagcacaactggactttgaattttggcttgtgcttgattttaagttctaaacaccagattgagggtgtcaggttttgtctttgtttttgtaatgattttaccatcgatgaaagctggcatcagtcatctgagtgacactgtcccttgaatgttgctttcccataaaaagaaaaacattcagaaggtcaaaaaaaattaattgtaatagccattaagtagaataagttcataattatggtaaaatacactttcgatgtgcctgttccattcagaaattaaaggatgatccattctaatttttttctattactatgatttaacaaagcaagagttaattgggagatatatctcatccttttgaattatcttccctctggtggaactgaattagatgtgttaatatttattggttaacataattataggctgtgagaacaataatcacacacttaaaatattaaaagtatgtgccaagagaagatgatgtctatagtagacggtgttgtgttataattgaaaggtacttgaaaagtcctagaaatgtagaccgttaatgcccaacattgatgtttctatttttgttcaaagcaaatttcaaaacctatagaatcacctgactacttaaaataggctagtaggtctgtgatttctcattagtcaaacatgtgttgtaagcttttttgaatccatgtctctatcatctttggaaggctgctttgactcatggtctaggaaaaatgatatatatgtggaatgtttatatggtaagaggttccaaggagctccattctcaaaacaagtctgaaaaatgtgagctcttgaaaataggttttgctaaagcattttcttccttttattctagggagtattttccgctcccaaattttctgactttagttatgttcacttactaatccctatattgattttggaaatttggcttaattccacatattcattgattcattgattcattcacctaacatttgatgagatcctcctctggatcagtcattggagatttaaaggttagtatcaacaggtctttcctttagagtgatatttaatcttacagaagagataagcccgtaagtaacccaaagggacacaggagaagggcttcaatgtgctacttaaattgtcacgtaaatcaccacgtgtcaaaattattgggagataaaatacaggaataccaacattgtaccttatacctttcagtgtcagagaggactgcgtagagcaggcagtatttgagctaacttggcttaaagtgttacgggaagggcatgggattcaaggtgcaagaataacaagagtgagaaagtcaaggaacgtggaaagtgaatattatttgaagaataagtttgtctaatggggtatgtaaagtgtaaatgggattactgctgaaaaactcaaacttacttagcagtacctaagtagcccttttgatgcccaagggctttcattgttagaaagagaaatttacagggggatagcaacagtgttactggctgcagtgattttggagtaatgactttagcttacagctactttataaaaaaatcctccatgacgctgcatggatttatgcaattaaattacattagtgtttgaaaccaaaatttctaaacattttaaatgtgtttgtcagggagtagttttagaagaacagatgtgaaaagttcagaggtgatcctggagtgaattgcagacaaaatgtgatcatagaatatcagagctttagtgggccttccagctcacttagccaaactcttattctacagatggaaagcttttgcccagagagggaaagaacacactcaaggaggctcatttagagacagtttcagtgattctttgtattttccccgaactatgacacaaaggcccagcttgatgataaccacgaccaggggagagtttggtttcctttagtatcacaattggtttattccaaaaagtctttcttttatggcgtcttctttaaaataagtctcaaacacataacaaagaattaggcatatcaaagacgtacttcaatggtaaacagaaaacttatgacgttgtaacatctttaagctagtatatatctaaacccaacccattaggtaggcatgatttgttagtataagtacagcttagcctctagaagctatgcaggggttggaacgaaattctgtctatttcttagaagacaagagatcaatcatgaactaatgacttttgtgttccttcttttatcagagttagggtacagtattcatcttctagtttctagtacagggctgtctttttttccccaagtaagtttggtaggattggagctgatgactgagtgacttggaacacttttcaaataaactgtcttacgttaatatttcatggtagctggagatttagtaatttgtgaatcaagttgcttttgaattgattaaatgggctttcactatcctcatttagactagtgtgatactgtgaaataataagaaataatatataaatatatttttctactccagtttctgaatcagtgtttgtaaatccttataatttcctaggtgataggggtgctggtagcatcttttgttctaacattattttgttattgaccttggttcctgactcagagctactgaattctgtggaatttcctgagtgatggaaatatctattgttttgatgaggcaactcttggtgggctcctggattttggctggttaccagaatgaccaagcaatgatttgaagcttggaagtttaatcttcacctctcatcctctggggatgagaaaggggctagagattgaatgaataacaaatcatgcctatgttttgaatgttttgaagtctgtataaaaatccctgaagtgcagagaggtttcaggttgttaagcacatctttatgccaggagggtggcataccccaactctatggtaacagaagctcctatacccaggacccttttggatctagccctgtgcacttcatcatctgcctgtccatctttatcctttatcgtatcctctataataaactagtaaatgtaagtaagcatttccctgagtttcatgagtaattctagcatattatcaaacttgggaaggggataatggcaaaccccaatttgtagtcaaatcagacagaagtctgggtaactggtgaccacccctactctgccccaccaccgcagcttgtgattgacatatgaagtggaaacagtcttgtgggacttgaacccttaacctgtgggatctgtaatagtaactccaggtagattgtgtcagaactgaattgagtcataaaacacccatctgataccatagaatcagttgatgtatgaaaaaaaccctcacatttagtgccagaagtaaagtgttctgtccaggcatggtatctcacacctggaatcccagcactttgggaggctgaggcaggttgattgcttgaggtcaggagtttgagaccagcctggtaaacatggcgaaaccccagctctactaaaaacaaacaaacaaacaaacaaacaaaacttagctgggggtggtggcatgcacctgtagtcccagcaactcgagaggctgaggcaggagaattgcttgaacctaggagacagaggttgcagtgagccgagattgtgccactgcactccagcctgggcaacagagcaaaactctgtctcaatcaatcaatcaatcaatcaatcaatagaagtgaagtgttctgtgagtagcatagaggaaagaggtgagtttttcttcttcaactaatatgaaaaatttggagatattttgaaaataagaatagggtggggcatagtttgatagcctcgtctccaagtttgccaacgggaagagcattggcttcttgattccctgaggtcccctctctgaaaggagctccatttgtgtgaacctgtccatgttaccagtttgtgcttccttttggttatttcaaaaatgggcagggtaactacactccattcccccttttcaaaagatagaatagtattctcaagctacaagaaataagatgatggctcaaagcaacagctcacacagtcattcccatttcattttgggattgttagcttgtgtctggagtttgttttaaaacttcaggcctttgaaggttgggggctggtcctttctgaatgctgttcatcctataaacgatatatttaattcctcactttaaaaactattctaacttcttagtctatttggaaactgagtactgaaatgctgtgtggtcatatggacacatcgttagctgcagtcccagcactcccacactgggttcctttcatagagcaataatgtatgaggcaacctgagaaattatttcaggtatatgtgtgttgtatttagagctttttataagaattcatgtggtctgagggcttgggtgcagtgtaatcagggtggagtcttgtggtgccctggatcttcccttctcatgtgttctgtgttctagcttgcaaacgccatgaggagctgcaggggagattaattagtaattaaaatgtttaatgcttcatattattcaatgcaagtcaaacatgtaggctactgggagatgaaaactacaacatgctgatactgtgtgatgagacatagactgtccctacagactagaaactttgctgtttctggcaaggctgcttgggacttgagataggaactgggtaataaatactctgttgaaaaagaaaataggtgtggatagtggcatcttcctcctcctatattctcttaggaaaaatttaggagcttttcatgatttgctgagaaatagatttgtctatgtattggcattgtctgcttaataataactttctttgagagctatggtaaaagttgaaaccttgtagaaacctctggtatgtgatgttaagtggaatacagtaaaataaaatttgcaaaacaccattttaaaagagaaagggatcttattcttcacaatgcccatgttttacttagaggatctgtgttgttttgaattagcctgtacccgccagaaaacttcaacagttaaataacaatgatttgggggtggaggagtggttagctgactcagagttgcatgccatgacttttatgacaggcaattaatttttagatggtatataattgcatttcaataacatttatacctcatcatttttttagaagatgatgtgtttgtgtcatgcgtaataagcataatcaacgttagctttaaataaattttgttttgagtgccatgaaaatgtaacattttcagagtggaaatttagcctaaaaatctaccttgcattgcacctctacaaagcttttgcccaaaaatattcatttcatttgtcccagtgtaagagctggctctgaatgtatcttagctcctagtggggataggggagggcagctgagcagatagctgctgagtgccatggggtgttcattcagctaaagcatgggagggggttgtcttctgtggttctctagccatggtccttgtggtagcctttaactgtgatttgtttgtttgaccttgatgagtccttggctccaagatgattatgttacattacactgaatcactcaatccaacattggtttgaaaagaaacgaacaaagctgcctgttgagtttctctattttacaacagtatctcagtggaaataattagtcctatgtctatgcagaagcacacatcacatttgcaaaattaaagagtgttcttgttaggactggtttctctgtttctttcttcctctcccactgtttaaatatctattttggtggtagtgttagtatgaaaccccatagttcctttcttttcttttctgatttaaaaagcaaataaacaagaaaacacaagtctagctatgttttttaactcaagatgactagatataaccacagcaaatatgtaggattgttgtgttttaagagaaaaagccgtgtctcagataatttgtagtcattgttttgtccattttgacatctacttctttatatactttatagccaaactagagtatagtgataataaggatgatctctagacagaaggttggaggtggttaataactcatcctacatatcacaatttttcatggtgagtaactggtttgccctccacacaaaatatcacattggaatgtaactgctaaggttcttcacactatggaaaaattaccagtaaagttaaacactgcctttcagtgggtatattaattataaagacaaaactatagtttatgttgcataatttgaacatacatatttccttatgaatctgtaagctggaactattgaaatgaaatatacaaagtgagcacgtgttgctgttgagccagcagttacagttttcatttacaaatgcggacagaaccatttgcgcattttggtctctctgctttgggtcctgcactcacactccaatatgcacctaagttatggggtcatgttgaggttccagactgcagaaggggatcgaattatgtttcattgtattgagtcacaaatatttcaatgtaaagtaaaaattttggaagttttacgtaacagaatataccttacaggaacagtagataggtataaaatgacttcggtttgcataacaaagaaataattgtgatgagtaccagactgtgaagtccctgaggcaaggttatcatttgttttctggcacatgagaggcatacaaatttatttttgctgaataaataaatattgtcttcaaatctttacatttccattctagaaatatgctaaaaaagctaatctgtaatagatatagagttagcacatgacaaagttatagctgctttgtgatttttttaaaataaagaacatgtatttgcattaagaaaaataagtgtggccgaagtgaatatttttttataagagcaacctaatggtaaccaatgtttcatccaaaattttcagctatactcttatattgccttatatcacttgatgacaatgtattttgttaagaagatgatgttatcatgaggtataattcaatattatatcaattctgttactgttgagataacataagaaagaaatatcaactctttttctatattctccacagaactgaagaaaacagaggactattatgttactatttcctaaataaagaccaatatgataaattccttatattcagtgagaggaaagaagttgcttaccgaatgtactgatatatgcttccttttttcagaaaacaacaacatcaaccaaaacacctgtataattattacatgaatttttttttttttttttttttttgatatggagtttcagtcttgttgcccaggctggagtgcaatggcatgatctcatctcaccgcaaccactgcctcccgggttcaagcaattctcccacctcagcctcctgagtaactgggattacagggatgtgccaccacgcctggctaatttttgtgtttttagtagagacaggttttctccatgttggtcagggtggcctcgaactcccgacctcaggtgatctgcccgcctcggcctcccaaagtgctgggattacaggcgtgagccactgcacccggccatattacaagatttttttttttgcgtttactgccaggaagctctgcttcattaaaagaagcctctaagattcacctcttccttcctttaccaatttatttctgatacttcttgacccagtatttcaaatgtgataaatatatgccaattataaagcatgtcaaaaccaattaattgtctaaatctaagtcatgctttttaagtggaaataaactttgtgtccatacacatatatttgcctataaacatcttaaaaatatatctaaacttcggacaattttaaaaagagagtattgaattttaaatggattctttgcttatattgatggtaaacagtggatccattaaagtagcatattctgctggtgtaaataaaatataagatttaagtgggttaaaaagatataatatttacttgttccttttaagaaacaagttgaagaaacaataaagcttgaagcctgtatagtcagatatatgaacccataaagtaaatcatttgtgaagtgtcttgaactctttctaatttcatcttgatgttgtactgcttatatgaaaatgctgaaaaatgttacttcttagatactgctagaggtgctaagcttcttaccattcaggaatcttcttcttggctctctccgtcacccagccaacacagagttatgttttatttcccaaatggccaacttatgttaacttgatgcttaccaaggcagtccaagccaggaaacaatttttataaacagcatcctggatgacttaatattctatgtaatattaattttagagctttttctcccatcatctagtctagcatagctaaaattatgatgtttaactttgttgatctacagtcacttgtgaatgagatctcccaaccaggaaggaaggaaagataggaaaatcagagtggtctgtttgcagctgtgctagcacatgtttccttgagtgccttctgaaggaagagtggatagagatgtatctttcagggccattgcctttctagcattattgatcgtatcacatgggcaaaagaaaaagaaacaatagattttatgacaaaagttatgtaaaaaggggctgaaatcagtattttgaaagttgtgactaattaacagtggctttctgagaagtgagatgggattcaagacagtggccattgtgtatgtatttctaagagccatctggatgctcctttttatttgtgtttttggcttattcactcatttattcctttattcactgattactaattgaatacaaagtctctgtcgatttgttcaaagatattaaagaagccctaaatctatggaaagacatcttctgttgattagttgcaagatgtaatattgttaagtgggatactccccaatttgatatatagatgcaaagcaatccctatcagaatctaagctggcttctttgtaagaattgacaaacatccttaaattcacggatgttcaagagacccagaattgccaaaatcatcttgaaaaagatgaggaagtttccgacacacacttcctagtttcaaaactttctttcaaatgacagcaatcaagcagtgtgatattggcctaagatatacataaagatcaatggagtagaattgagagtccagaaataaaccattatgtttatggacaattgattttcaacagggtgttgtgacgttcaaacagggaaaaaatagttttctcaacaaatgatgctggaaccaccagatatctacaaagagtaaagctggactccctacctcatagtgtaagacacaaatgtaaaggataaaactatacaacttgtagaagaaaatatagaagtgaggttcatgaaattgggttagtcagtggtttcttaaacatgacatcaaagcacaaacaactgaagaaaaaatagatgagttggacttcctcagaattaaccaaatttgtgcttcaaatgacaccatcaagaaagtgaacaaacaatccgtggaatttgcaaatcatgtatctgttaaggggcttatatctggaatatattaagattcttacaactcattaagaaaaagacagcccaattaagtaagaaacaaagtatctgaatagacatttccctaaggatatacaagtggataatatgcctaggaaaagatgctggacatatttattgatcaaggaaatgcaagtcaaaccacaacgagatatcacttcacgctcactaaggtggctataataaaaaaagacaacatgtgttggcaatgtggtagagaaattgaaaacatcatacgttgctggtggattgtaaaatggcatagcccttttggaagcaatctgtcaattcttcaaaattggtcatagttaccacatgaccaagcaattatatttctatttatgtatccaagggaattaaaatatatgaccacacaaagacctgtatagagatgttcatagcaacatgattcataacagcctaaaagtgggaacaacctaaatatctatcagttggtgaatggataaacaaaatgtggtgtatccatacaattgaatattactcagccataaaaaggaacgaagctctgcaacatgctacgatatggatgaacctgggaaacattatgctatacgaaagaaaccagacaaaagcgaccacagtttatgattccatttatatgaatgggcaaatccagagacccagaaagatgagtggttgccagtggccagggggaggggacaatacagagtggctactaatgggtacaggatttcttttggaaaggtgattaaagtattctggaatttgctgcacaattctttgaatatactaagaatcactaaattgtgcatttttaaagggcatattttatggtatgtgaatcatgtcttaactaaaaaatttgttttaaaaggctctgtattgaataatttgcctagaatacacacatggcattgggagtggcctccactctgaataagcttacaatctcttggggaaaaatgcaatctaacagttatagtacttaagcgtacatggtaagaaagaagcacatggagggtgcttattgaatgggaaaaggaagaaatctacctggatgatcacagaaggtgtttggtggatagggagtatttgcaagaagaatccgactctcgtgtagcttgagaaagcagaatgaaaacccgtatctaggaactgaggaaggcagtcagcaatgtaaggtcaatatttttctaaaagtaatggcagctgaagtacaacttaggctgcctgagaagagagcaagttttccttcattggagcatttgaaatgacactctggtatttacaaggtgaattattcacactctttaaatctcagtgttctgagttgataacacatttcagagttgacatgaggaccacaaggaataataagtgtgtgtttaatgtgaaaatacaatatcttgtacataataaacagttattactgttggtctcaccaccaacatcattatcaaatgaatcttggcagtaattctgggaaaggaatttaggcaacagatgggagctcatttgaatgatgctaggatttcatggtactcccattgttggttacagaactccaagaactctcattcttggagttttctgtttcctcatataaaacttggaaggaagaacagaagaccttcattctgttccaggcccttaaattgattatttctgtgcctaaagcaaactgctcagcctcaatcatgactttgcacaatttgctgtgatacctggtatagatgtttcatttgttaaagttgttactgacaagaacctccaatgaccttggaacatgacctggcccctgtgggtatcagtagaattttggtgaacactgagaagtctctgagtttctttcaatctgggcttctttcagttggtttgcaaactggacttgtggaattagatgatctctcatgcccattctatctttgagttggtattatttttgccccgtattaaagaaaaactatattgatatttctttctttgcttttgttatttcactatagaaaattttgttttaacattcggttggagttgatgatatacaacccaattatatggatttgttatatgcaaacataaggaagtattcacaaatttaaagaccaagttcatgttgttcaagataatgtgaacccaaattcattgtgctcaggataatttggaactaatttcatagagtttaagatatattatagtaattaaaatcatggattttgggagcacactcccctgactctaaatatgtggcctgggatgtcacttaaacattttgtgcctcagttcttttatctctataatgaagaccattatagtatctatctcccaggattgtaatgaggactaaatgagtttccatgtataaagcacttgaaacagtgtttgacatatttagcaccatatgcattagaagatcttattgttagctgcgtgcttattcttaaattgtctgagttactgcttttatataagaagattgacttataaatttggcccatgatgtcccatccaactctctgaaatagattatctacctcttttcagctgggcatcttacttatgatatctgaggacatctctctgttcttgtgctttgcccagccccctttggtttctaatgcatggagccaaaagctacagctagagccataatggtcttgtcctaccatctgaaagacatgttgattgctagaatgtttctgtggttaacaagataattcctctgataagtgaacaaccttcacttaaatgcaaaaattatgactcatagattattaatttgtcacaatttactaaccctatcattggcctattgatgtaagttattcttgtcacgcttcacctacccagacgctaaagcatgtaaagcaatagttaagtttattgttcatctgattgacctggagggcttgttaaatgccattactgggctctaccttatgttttcaattcagtagggctggagtgaggctcaataatttgtatttcaagtgttgctctggtgtggaccacactttgtgaaccctttaaagcttcttgtcagtcacatgtttgtaagcagcactgtcttcctctgttctcttatttctatagctgcacacccttaaggcttgccctagtgtcaaaagtggatgctagttttatgtcttttttctagaggaggaaaaaccataacctagagaagtatctttccctgcatacatagtacattgacagaatctggaagatgccctttaaaaaaaaaaaaagtaaagatttgtacctgccattctgtctttcagaattgtaaatttatgtttattgatattaaatatgcctgtaatcccagcactttgggaagctgggaagggcggatcacctgaggtcaggagtccaagaccagactggccaacatgttgaaattctctttctaataaaaatacaaaaattagctgtgcatggtggcgggcacctgtaatcccagctacttaggaggctgaggcaggagaattgcttgaactcaggaggtggatgttgcagtgggccgagattgcacccctgcactctagcctaggtgacaagagcgaaactccatcacacacacaaaaaaacaaaaacaaaacaaataaaaattgtatagatttatggtgtagaacatgatgtttgatatatgtatacattgtgaaatggctaaatcaaactaataaaaatttgcattacctcccatatttattttttgtggtgagaaaacttaaaatctcccaacaaatttataatacacttgcatctgcaattcttgaaagaactattaggtttggaaaactagaattccgaattcagttctgccatacctagaaacgtgaatgtcaactgtttgatctctctgaacctcattttctttgtccatgatattaatacctcctctgcttatcatatatgatattgtgagaagtaaatgacacattgtacattaaagtgctttgtgaactataaagcgctatacaaagattattttgcattctcatcccagttgtcacacacaatatcttgttaaacatcatctgttttatgataggcacatccttctctctctcagctagggtaaatattgacttttctaactgttttcaggaaggaaatagtgcactgtgaactacttgccttgtgcacagaatccttttatttccctcctgtgattattttttcttttctagtctcttgctttttaaagtaaacaattaagaagcttgtcatttagccatttatgcatctaaacacttttgtatatgtgagatgtggtcacaaacataaacatatattatgaatttttctcataacatccttttatgcaagacatcctacacaccacatgtattaagaatgaagtgagttgctgttttgcctgaaatgcattattttttgtttttgtttttgacgtttgacttggaaaagggagttgagttgagccaagagcaatgggtcctcttcccagttgtgtaaccagcaggttgtgttaggtaagtcagctcctttcttgaagcctcaggtacatttgtacatagatcgaaatctagtcttttctcatgccttccactctcaatgtctgtgttctcagtgttaaaaggaagtttcagaagatgaccttcaccttgatgaagaagtccgaacagagtatccccatttatctatctctattctgctaagatacttttcttttcatgcctcaggtctgactgctctttgcaattcagcctgttgcagtgaagctctgacatgtctttcctttaggatgtgactggtcttcactaggactctcaatttcttagggcttacgtttctgttagtatgatcggaaatagaagaggccatgtcctgcctttaatcccctgggatagagatgttggtggattgggggattgaggggtggagaggcttttatatttttagtgagtctttccctttagtgattttcagagcatctccctattagtgcacagtaagaagtatttgttctttttgccatgcaacaaattgcttaaaaaccaagcagctgaaaacgcgtattttctctttgttcttggtgagacaggaatctgtatatagcttagctggaccaccaacttcttggtctttcacaaggctgcaatcaaggttttgactcagtctgcacttgtatctgaaggttcaacgggagaacgatcagcttccttgcttaggtggtttttaatttttttatatggttcgatttcttccaggcagttgcataaagtgctttagtttatatctggttgttggctggagtctatcctcagttatttgtcatgggagcctctccatgtggcatctcactacatcaaagcatggaagctgagcaagcaataggtagagtttgattacaagatggaagccataatcatttgaaacctaaatgtggaggggacagcccatcacacttaccatagtctgtttgtttgaagtaagtgactaggattagcccacactaagaaagatggcattgtaaaagaatgtgaagcccaggaattaagaatactagggggaatcttataaacctgccgatcacaaaagagagtgaggttagacttactgtccacagggatttagtgcaaatgtaagtttatttgtagaatctgtcaagtcagaaagcagaggaggcatgtggggtatcatgagaagaatagaatctggaaggagtaacaggtaatgaaaggtactaacagatgtaggaagaactccagaatttaagaaagttatacctgaatgtggtttaggaggtcttttgatctaaccacctccatttctcaaggagtccaaagcatatagagggccttactcaggccagaagttgtggctgaacaatgagttggaacaaagtccacaaactcctgacttagtacagattttcagcttgatgtaatgaatatagctctggatttggagtgaaaagatacacatgttcaacttttgatttgcctctgagtggctgtgtcaccctgagcaagtgataagtaaaggaagcttgatatatggttacccagtttataacatgaagctatcattatcatgtatattcatttatgtctgatgaacatattaacttttctttatgaaaattctttgtaagctgacatgaacagacacttctcaaaagaagacatttatgcagccaaaaaacacatgaaaaaatgctcatcatcactggccatcagagaaatgcaaatcaaaaccactatgagatatcatctcacaccagttagaatggcaatcattaaaaagtcaggaaacaacaggtgctggagaggatgtggagaaataggaacacttttacactgttggtgggactgtaaactagttcaaccattgtggaagtcagtgtggcgattcctcagggatctagaactagaaataccatttgacccagccatcccattactgggtatatacccaaatgactataaatcatgctgctatatagacacatgcacacgtatgtttattgcggcactattcacaatagcaaagacttggaaccaacccaaatgtccaacaatgatagactggattaagaaaatgtggcacatatacaccatggaatactatgcagccataaaaaatgatgagttcatgtcctttgtagggacatggatgaaattggaaaccatcattctcagtaaactatcgcaagaacaaaaaaccaaacaccgcatattctcactcataggtgggaattgaacaatgagatcacatggacacaggaaggggaatatcacactctggggactgtggtggggtcgggggaggggggagggatagcattgggagatatacctaatgctagatgacacgttagtgggtgcagcgtaccagcatggcacatgtatacatatgtaactaacctgcacaatgtgcacatgtaccctaaaacttaaagtataattaaaaaaaaaaacattaaaaaaaaaaaagaaaattctttgtaagctataaaagcctttagaaaaaaaagtaagctttgtttaaattattaatgtgtaggttgaggcaaaacaagcactcccttttgacagaagggataagtactggttcatataaatacaattttatctccatctgtatctgtatcagccatttatttctgcttgataaattatcccaaagcttagtaatgtctaccttactcacatatctgcaattttgatagtactccatgaaaatagcttaactctgttctgtgaaatgagcccatgtgcctcgatttgggtgcagaggattcactttcaagatgctttactcatggctggcagtttggtgttagaagtgcgactagagttgtgtgtcaggaccttagtttctcttaatgtgagttcctctacaggctcctagggctttcttacagcatggtggatgagttccaaggccaagtatcacaagagagaaaggtagaaatgccagcattgttatgacttagttttagaacttacacagagtgtcctttctactatacactgttgattgaggtccacctgggctcaaagacagggggttagtctccacctttgttgttggggttgtagtaaggctccagacaagtttgtgggcaagagacactgtcgtgaccatctgtgtacagtacagcctgccattatattgtattttattgcattgtatcacattttactacatcatattttaatgttttatgttgtatttgtttccatttgtggaggacttaatatctgccagacatgtatattctgtattaaagttgacttaattctcacaacaaccctgtgatgacgtggtccttctcattttcaccaacgagaaaaccaagttataaagatggtaagtaacttgcctaaggtcaaaccagctcataagtggcagagttcaggttcaaaaccaggcaatctagttctggatcccatacttttcaccactctgccagattatttctatgttgttatctgtttttatgtcttaaataatatttatgccatgctgttactaatcaccatttccatccctgtctctgtatctcagttagagaaagtgggtagataaggactggatatcagactggatagggaggaaacacatgcaggagtatcattacctttgagagaggtgggtctgagcttgtccctaagtgctcctggaccagttctaggagatctcaagaaaagaagcaacgtaacatttcactagttccatacagagtttatattggccttaatgattttgcctttaatttaataagacatatgggagtctacggaatctagggaaggcagctgagtaagtaacgatatttttaaaaaaattggaaataggggccaatatttgaagactaatgaaattcaggggcatctattctcgttccacaaaagtttagctatctggtattccatctggtgatctattcaatcaattaactcttccatattgggatgtttgtcagagtccagcttacaaattgaggaaatccacagtcacttgtgagctagtttgtatcagttattaaaatttacttatttattgtaaacttcatcaaaccaacaattgttaagcccctactgaatgcaggacactgcagattacaatcaaggggaacacagtttataccctttctcacaccacaagggacttctactgtaagaaaaagatgtgtaaagccataacgacaagaatatgtgataaatatgataatgaatctatgaacaaggctgtatggatgcctagcggaaggtgctccaatattctcctggagaggtcagagggggcttttcagagcatttaagcatatatattacaggaactggaaatgttcagcccagttggagcttagaaaatgtagggcaagtgataagcctggaaaggaaggcacgtagatatgtttctgcaaatgcattccctccttctgtcttcctgtctgccttatatacacaatgatgactcagtaccaggaatctcaggaaacaaacaacacacatgcacaatataaattcctctacaatccctctatttatcctcagtgcaaaacctcaattaactaatagctcatctgaaaactgtcagggctagaaagtcccataacccctcaggataaaatcacaccaaccgtaagttacttaggctctccaaggtcagcctccttttatctagcttccctctttttataaagctgcgggcctgtctctaacaggatcatgtggtaacattcatgatttgcaagagctttactgctacaaagcacatttgcaatacactgtctcttttttttacttggcatttgcgatttaattgttaacccacctgatatatagtgaaattgtggcccagaaatgtgaaatgactgctcttaatttttacaaaaataaaacaaaataatctaatccttaaagtcgtgtcttcttttgcaaaatcctagtacatttttagtacatcagttgtgttccgtagctggggactctgttcaagtgaaccttaataagaagtgtgatgtataaaatggcagagtttgaggtgttctgactgaaataaggagtctgggctctggagcgtggctgagcatcttcttgctcactccagaaacggccctgaggcttcttcatgtctagtgttgtgaaaaccactcaactgcagtgtgcttattacctatgtctaaccttggagcactcagaaaagacctaatgcttattttactgtctgaagtgggaagacagccattgttaacgtgggatctcccctagcattctccttctgatcctagcgtaaattcctgtggatcaaagcccagcccctgagactgtaacagagagaataaaagaacaagaagatggtgaaggcgatatggtgtggtagatggagcatgtgaattctcctagttctgcttctaactcactttttgatttttagcaggcaagctatttcacttctcttgtgccacggtttccattcataaactagggaactggacttcttgtctcctcaccgtctgattaaaaacattccgtggtgattccttttcttggtaagacacatagcttagtccacctcaggtcccaaaaggaggatcaaccttagtgttttacgctctctaatatgacctcttgcggtcgatgttttagaggtatctatcatattgcatggattgagggagtttgacctgttgagctgggcgagttatcaccatgcagcacttcaggtgcttactctctttttatccatgcattggttcattggattcaaacatttcattagacttcctgccttcttttggggggatattttgaatttggggataataagtttagaaatctttgggatgaagaagaggaaagagaaggcagaaaaggagggccatgactataacatttatcagcaactgtgcctcttccagaagaatcaggatggactggatttgaatataaaaagtaggaagagaggcaaggcagaaactgggagaggccgcagatggtagtgattgcagatcctttataaaatgctgcatgtttcaactttcctctgcccaacactatcaagtgagatggatccttggaggtctttgggtccagtcctcaaggaatcaaaattacatctaggtagtaggaataggttctagtgttctataccacgtgggataactatagttagcaataatgtgtgatgtagtttcaaataactagaaggcagatagttaatgttttcaacacaaaggaaatgataaatatttgagatgatgaatgtgctaattaccctgatttgatcaatatacattatatgtatggaatttcactgtgtaccacatgaataggtataattatttttaatttaaaaaaagcagtttctcatgtaagctggatgttgctggatagtttaacagaagtctgtatagccttgttgtattttaatcattttatctttttttttggcctggaaaatattaagttagaatggctgtgctggaatacatcatccccacctgtatattaaagctctgtgttatttaaaaatttgtctaagaaacctataaattgatggagcctcactgtggtggttctacttctctattttgtgtgtttgtttgtttgtttgttttttggtctggtgccattgagccactgtctataggaataaaaggatgttagcatgactgatagttcagtgacctgtaagtagcgattttaaagaaaaattttataggtctttgttagttccaaatctgactacctgttaattctgctttatagtcatgctctgactttaccatgaaggctgtagcattgtgctttatctccttgtctccagagtacaagatcttggtaagagaaaagagtgataaacccaaaaaatacaaactcagtttacctgagactgagtagcacagaggtctccactaccactcatttccctcttcacatggcaatggaacttttcattaaaaataaattgtatttactcatgtatattcttatgctaaactgataccctttttcacaatggataaaacaacaataaatgtttgcagcctcgcacatcaattctcgaaccctgttctgcaatttctggcaataaaaggccttgcttagtgtgcattaaaatcttggttctaaagtcagtgtctactttcatagaaagtatagtttgtgacctctgttactatattttcaccagcaatttgcacacttgtcatgaggctttctctttgtatgggtcttagataatgcagtatcttgacatggtacttctatggtaagacaaagaggatgctgtttttgtattaatgcgaccaaaatatttcaaagccaatcttacagaatccccctattggacatcccccataaattttttaatggaacaaaacccctctgtgagaaataacaatttgtatacgatttcaaaggcataattcaaactatagctgaataagaaaaataatacaggatctaacaaggcaacacttaatgaaaaatcaagggccaggtgcagtggctcgtgcctgtaatcccagcactttgggaggccgaggcgggtggatcacaaggtcaggagatcgagaccatcctggctaacatggtgaaaccccgtctctactaaaaatacaaaaatttagttgggtgtggtggcatgtacctgtagtcacagctgctggggaggctgaggcaggagaatcgcttgaacctgagaggcggaggttgcggtgagccgagatcacgccactgcactccagcctgggtgacagagcaagactccatctcaaaaaaaaaaaaaaaaaaaaaaatcgaacaagtctttggatattaaccatagtgatcatgccctaagtatgtatttactttaggtaaatcttagtaaagcaggaattagctggttagctgcacttactggctttaggttgctggttagttaactggaaaggctgttagtttagaggtgatacgacacatagattatggtttaaaaaggttgcagcccttatttctagaatgtattcaatggtatctgtgctgcctaacccatagggttatgttttaaacgatatgatataaatgtgttatactacattttgaaacgttagttggtgtcactatatcttttggcaaagagtctccttatgaacttcagggagcttgtttctacagaaggagtttggttcataagatgttttccataagaattatataaatttttatataaaaaagtagtgcccaaactattaactcatggagagagatcaaattctggtctttttaaaattaagctctattagtccattttcacaccgctgataaggacataccagagactgggaagaaaaggatattttattggacttacagttccacatggctggggaggactcagagtcatggcgggaggcgaaaggcacttcttacatggcagtggtgagagaaaatgaggacgatgcaaaagcagaaacccctgataaaaccatcagatctcataagacttattgactaccacgagaacagtatgggggaaactgcccccatgattcaaattatctcccactgggtctctccctcaacatgtgggaattatggggtaaaagtcaagatgagatttgggtggggacagagccaagccatatcacaagcttagtgagaaacctaattgcttatatactatctattattttcaaattcattttaatattttggattcttatccaactaagagatatagggaacaaatgctgtaataatcacccatctgtaaaatatggaccttctcatagggaacttacgttttagtagggaaaatataacatatacactaatagagattacagagtaggaggtcctttacagagtaaaaggagaatggagatgtacagtttggtgtgtactgtgggttgaggaagattgtgtgttgcggaagatggtgacagctactgacgagtcactttctgccatagagatcaattttccattggtcaattgtggacattcactaatgtaggttggagtgatgcttcaggagcagacatggcataaactatttcaggaaaccataaacagcttagctttatcttcagagtagggtatgaaaagggagagaccaatggtaaaaatccaaattagaatgatgtgatgccatcttggaggcccttgtaagtcaagcaaaggagtttgtgcaaaaagtttgaacattaacaacaacaaacaaacaaacaaacagaaaacagaaaaaaatattgcattgtatctgtgggaccttcccatccttaggttttaattttcccctctgtcaaatgagagattttacttgataatctccaaaattgtgaccagctctaatgttttacaattcccagaattattacatcttaacttctccctgagaattatttactgatcacatagtagaactgaagtgatttctacagtagctctatagctagcaacccagcattggataaactcaaggaatgaaaaatctagtgtgtgctggggttgggagggtagtcatatattactgatttaactgtcatctggaaaactttatgggaactaagtagaggatgccataaggaccattaactgctcctaagatatgatgagcaaagactggagaataggagtgggcctagtctacagattagttttctattattgctgtaacaagataccacgaaattggtgtcttaaaacatcacaaatttcttatcttacagtgctgtaggtcagaattctagtccaggactcactgggttaagatgaaggtgtcagcagagcttcgttcctttctggaggctctagtcatagtcattacctttcccagcttctagaggctgcccatatttcttggctctcggactctgtctttctagtgacattgcatttctctgaccactctttcatagtcatgtctctctgaccacagctgggaaagattctttgcttttaagaactcatgtgattagatgaggctcacctggataattcaggctaatctccctgtctcaaaatctttaaccttaatcacatctgcaaagtctttgtaatcaacatgttcacaagttcgaggaattagagtgtgtacattcttggcggggtggggagggctgttcttatgcttatcacagtctgtttttaggaaagtagataagttcacaacgttaatgcatggaggctgagattgtgagaagaaatgaagcagccagtcataaagtgtgtttcgtgctaatgtaaagagttctgaagttattctgatggccatagagagctattcaattctacctagtagaggaatatttaatctataatgatgtcaaacaattgaagtgggtagcttgtggtacccaaccatccttcgcattttaaacatgggaaaatgaagactattttttgactcagtatacttgggacacatattagtgccatgtacctatcattattttcccatatcatgtgtttttctaccctttcctcctacttgtttttcctctagcctgtgagaatgccattcatgatttataatgttctgggtaaaaagttcaggtagacctacattaagcaaaggtaactcagatttggaagactgaagcttggtagcagggagggggttacttaggacagagagatgccttggaatggccgcacattgagctcgtgcatgttggagctggcattacccatgtgaggaggtggatgacctgtctatatattcaacactagcttttctttgagatccccacaaaacagatctaggaaatctaatgaaagaattatccctgctacaccgtgtttttaacataggaacggacagttaacttgtgtgtttgttcaagaatgattcataatgcagaagatgaactggtgaatagaagaagcctagtaaattggaagattctcttgatgaaacagagaaattgagatttattattcagtcacttccaattacactgttgtgttgcagaggaaagcagctaaacaggatgttggctggtaacaccagcaaagtggaatcaacctcaaaggagatggtgtcagagtggtgttcaatgcctgagcttctaccgagtgagtcacttgtgtgaaaatgtcttgacacagatagaattgaggtgcccacactatatctgatcacagaaatgttaatgcagaatagcaaactggctttcatcttcatgggattgcaggctgggggataaaagggggtgcatttttaaaggtcatctctattgcttatgagaaaacaatgtatcacatcccatgcatctgtgagactgtatatcaagaatcagaaataaatacatttgaaggaaaactgcaagttgtttctcacgtgtgaatttgatgcttttttttaaaaaaaagaaagattttctggaagaatttagcctcctgaaaacttgtttcttctgtgttgtagttgataatatctaccacccactgtggtgcatggagaggaaaaaccttctatcccctactttatgtgttattgatgtgacataatttttcagaatagccacacaatttcaaatgtgacttcttttctaacttgcaaatagagctgacaacagcaagatatgtcctgtaaacaaaccccaaaagaatatttttgaacaagttgtagttcaatttataccagattatggaacactagagatttacagtgatgcgttcttttatttagatggaataggagaacccatagagttgaagctgtttgtctgaaggtttgcagcagatcagtggctctgccaagcctgcaactatcatcacctgactccaagttactctctttctagtccagcacagctgcctcccaagtttaatagtctatgactcacaatccaaatctatggtgacatataatattttactttgattccaaatcaacaagccagttttagaagtgcttacactgctgcattactttttatactattgggttcttcaagttgagtcttatttctagaactccaataagaataaccagaggagtcatttattttgttattatgacatatttattgaagacttattgggtggcaagctgtcttatagagggtgagggtacagctatgcataaaacaatgtgtattttcttaaaagagtttatattactgtgggagaggcatagtaaacatgttaggttctatagagaaaaataaagcaagataaaagtgaaagagtgctttgggttgagtggagccatagttgctattctgcacaaagtggttaagaaaagccttaagaggaagagatatttgaggagagatctcaaggaggtgaggaagtgagctctgcagatatttgggataagcatgttatagacagagggaagcacaagcgtgaaaagtctgagaagatcatggctggcatctggcatttttaagaaagagtgaagtagccaagggtgcctgaagccaagtgatcccaaggaagtgaggaaaaataaggttagggaggtagcaggggccctcatgatcacatagaacctcataggacctcttattcttagtttaagtgagatggagagcatttggagtcacattatcaggcttatgttaaggatcactcaggcagctttctgtaggctatgtggtaatccaaaccagaagtgacaacacaaactagaaattacaatcaaactcaaaatgatagttggttggacttggtaggtatagttggtgttggggaggggataagaagtagtgggattctggatatatttccattgcagcctcaacaactattgtgagcagatcagatgtggaatataagagtaatagaagagtcaagaatggctcctaggtttttaccctgagcaaggagaagaatggaattgctatttagtgagatttctggagacaggaagattaattttgcttctgtttttgttgtttagaagagaaaggagaaaggatgatcagccatttggctttgaatatgttatatttgagctatcttttagagattcgagtattggttgagtagacagctgtatatttgagtctggggtacaagggcaggctcttgacttgatataggtgtaggtgtcagcagatatacatttagagctttgagcctggatcatatcacctaaggtaatggaggaagccatgaatattttgatgtcatggagaaaatagaggaactattaaagaatgcttgggacaagaaacactgaggtaggaggaaatgcaaaggacagtggtgtccagaaatgaagtgaaaaatgtgcttcaagagtgagtgtgtgatcaaggtatccacaccattggatcaaatgccatgaggattaaaagttggaccaatggatctagatcttagttgaggattgccttgataagaacagttatcgttactcttctgagctatttgctcacacttgccttactttttgtcaaagtcgaggcccctctaaatattggttaaatacaagggctctggagttgccctgtctgaggtcaaatcctagtttcatatttactagttgtttgagcttggaaagtttaattaacccttctgtgtgcttcagttttttttgtttgtttgttttacttttgaaaggaaagaaatgatatgttttgtctcataggtttattgggaagattgcaaaaattaaacatataccatagtgtctgtcatatagtaaattaccaataattgttagctctagtgattaagaataaaatgatcactaacatctataaaattacacctgacttatatttccttcttaccctgaaaatcatacaaactctttctagagttgtgcttgagtcggttgcactattttctgcctttttgtttttttggtttgattttttttcagtttttttaatcattacatgaattaacctcattatgatctaattacttccacatagttctccagattgtgaatgctctgcgaaaccatagcttgttcatatcttagaaccttatgcaagggttggcacttttggcacttcaggcttgaaatccaggtttctgaatgccctggtgattgattgacatttcaccttcaaggtcattccaatacttaatgtagaagtgatagggtaaactcttaattactggaattacctataaataaataaatgacttaaatttcctaaaataatagttaatgtcttgttaatctgagttccttttctctgtaaattatttcacaggcatgaccctctgtaattttctcaccttttaaagtgatcctgaggtatatcatgcaggatagttgacctttgggattggtgttcttgccctacggtagatagctttgtgaagtcttccctccctttctatttctgggacctagaacttaaaatggcctcttatgttgaattcttctcattcatatttctataaactcaaataatggtgcctttaacatcttcagacgtgccttcatgcgttacaaaaaaaaagatggtttgatatttgtttcctttatcttctttgaaatgcacgaataaaggtaactatttacaaacctgaaataaagcaaaactgtgtttattagattcttgaaaagcggttttgcaaatctaaatcaagcaccgggctaggaggactacattaagcaacaacaccagcaatgagtggtatattttaggaactgtgtccatggacagaatgagatatcatgagcaaatatctgttgcaattcctgtgccaattcataaatggcaacagctgattcttgccttgctcacatagttgtagtctggatggtaaaaggtaatattttcaactccttggtttactttgtcaggagtaataagtttctaataaagaagctatatttatacttctcacctagcctctctctctctgtgtagtccatgccacaaacactgtacattggctaacatatttgtctgagtaagggtgagagacaagaagaacatgagggaaactagaggttgtacaagtaaattctattgttgctaatgccataatttattccagatattatctagtcccagaatgtgcatatgaatgttctggcgctctcttttctgtacttgtaataaacaagacatcagaagacacaagagttgagagggcccagtttcagtacctcttgttataaatcatcaagcaggtaaagagaagatccctgatgttatcagtacttttgagcagaaagcatggatgttatcagtatttttgaccagaaagagaatggatgttatcagtatttttgagcagaaagcatgcgtgtttgtacaccttcttgtttactccacataggcactccgacaaaatagtatctctacctcaaccagtaagttccttatctgtctctgagttcttttgtccttctacagaaacaagagtgtttctcttaaactaactccctcattctggataaactgatataataaaaacaccagaacgaaaacgcatgtattcataccatactttcccacctcactgtgctgtactctgtagagttcatatcctctcttcttttacacctcttcagtgagctctataattttctagctcttggttgtttctctgttcgtatcatctacctgcaatgccattcatcacttcctacctgccactctcacccttcattttttacctgaggagctgcctcctaccccgtatgagttgctgtacacgtttcttttgacacttgtcacatatataccctgttatggttgtggtcagctgtgtagattcaacttccttgacaaggctggaaaattgtgaattgtaggaagtgtgtttgagtgtgcttccgtttctgggattcccactgtgtctaaccctgtggtatctggcatgggttaggcaatcaacaaatgtttgctgaacaaatgaaaacaaatgggtaaaaaactcaaacctttaatattcattttttaagaaaaatagtaaatagcattaccatgactgacagaccacagttaatttgccatttctacctcccacttgctgttctcaaaaaaagtggaataaaaccacagatttgccaatggtcaaaagatgaatctaaagggcaatgatgttacaacttattattaacttatttcatttctgcctaccaagaaatgtgtatgactcagcttttgtccaagcagcactgcttttgttctattttgaattcgtggtggaaaggatgagtttttgataaagatcttgacttttttgtatcaaatagaggataggacggtattatagagattaggtaatgaaatgcatgggttctaatgcctgcactgcctctacccctgtctagctatatgaccttgaacatttccttgcctctgtctaggccttagtctccccagatgtaacatgagggagctgatgtagttaattgtcagtggctcttgcagccaagcatcctagactggaattctaggtgggattcagagtaattccttgtgatgacatatgactcaaccttcagctgttaactggctcaccatcgtgacaacaggcaccagattattcacacatttttgaatatttgaattgcataaggctgctcaatgatggtgaaaattgggtcctaaatgttctatcagatatatatgtagtgtaacctgttcaggatctcgtgtgagtgtaaaatgatgtgtgaaatatgcaccaagcaagaaacactttgcacattatgataaggcagtaatacaatttgatttttatgagttaaagatgatggtactataagagctctagttatatgaagcctggaactatagtatgtcttagtctttatagaaaggaaaacaattaaaaatgttgtttctcactcttgtatttccgtgttcgtagagtcaatagtttcactcaaggcaggaagacaagacctgatgttagcccctctgtccgagtcattcaacacctcaccccctccagttatatttatatttatacatattttattattcttttactatgccagtaccacaatgggaaatatgtttacttttaaaaagctacccagaatcctccaatttctcgtccgagaatataaaaacacttacctcacataaactcacttaagaaaatgtgaatgtaacactgttcccccaaaccgctttcttctttgaatgccagcttttcacatagcagctttcctgacctcctacttccaggacctcagacccctctgtctgtgggctggcacttggaatgtggctgtccacttggcaaagtggaaagagcttctgttctcactgtggcatctggggcctcaattctggttccaccactcagcagctctttgaatgctaggaggatatttcacttctccagatcctaatctcttcactggtaagagaggaataattatatttactttttgacatggctagaataattacagagaatgcatagagagcatctaacacagagactgacaggtagtaggtgcaggtttacttccccttctgtagatggtccagggtctctgacgcatctctgcttcttcactggtttatctctgtgctatgctaccaccaaggagtcgtctatgcacagataaagagggaaaatggtctgcagtcatcacttgggattctatgcaattcagtgaggtctcaaatcactactcaacaaccattcagcagcaatgcgatgtcaatgtccttatctgtttctcatgctactactgtttcatatctcctacgtaatgtagtttaggagaaagagtcatgaagtgggttccagtagtcctggcttccagttccgattctcagataaacctactctttgacccatgccaagtcatatccttccacatatttaaatgacaatcctataccttagttctctccagagatacatagattgttcaggctgatgcacttatgctttgatttactggatattcaagtaatgaagcctatctttttctatgttttcttctttttatggaattcaaagtctatgtgttcttgccattgcccctgaagtagtaacatttctgagcctggctgatctagaacctctacaaaggctgtccttccttcttgataataagtcagtgcatttacctaatatctgggagtttacaaagtatcttcatttattcattagtattgaagtctcagtagtaactcctgaagatggggattcttacccacattttagagatgaggaaacaggatgggagatgaaaggatgttctcaggagtcccacagtaggtgttagttacatagcttggatttcaagcagcatccttctcccaatcccaggtcctggcctgaatgtaaatgtgatttccaatccaagtttgaatgtctgtgcactcattagtccctagacaaatctggtttttcttgcatgagaatgaaattgaactttcaaacattttcttaagcctgtaggatctacattctcttcattttctaatatacttgtaactttaaattccttattaagcccgaaggatatttcacttcattgtagaaatttaccattgccattggcttctgcaaaacttggcagtgaactttttttaaaaaacgtggccattgagagtggtccccttgatacttgagtgtgtattgtcccaaacattgcctcaataggtagttactgtagaagaaaatgccgtagttttaatggcagccttgaattttctcctctctcctttaatggaaatccattctatacttattaatccactgagcttgtcagtacacatccctgtcatttctcaaaaatgtaaggaaacagcatgtatagaacaagcactggactaaaagtcggaggagcagattttagaccttccttttctaccaattatttggaatgtggcaaatcgctttacttctgtgaacatctagttcatgttttataaagcattgaagtagatcatttctaaggttcttttccaccctatttggtaaattgtctagcatgttctacttcccacttgattaaattactctgcttcattttttttaattttgcaaggaaatactcattacatataaggataggagacttcacttatttccacagatatttattgagcactgactatgtgaaacataattaaagtgtaatgggcatttggaggagggagacattccagaagaggaaactgttatgagtaaagataaagcagtttgaaagtgcactttctaatgagaacctggagattcatggagaatttgcagcgcatggacttgtgagcagttggcgttaaggttgagaagagggcagtgtggactgaatgtggaggcttctacagtgtgtactatttataatcacgcacacacagacacacacagacacacacagacacacacacacatacaaacacacacactcatcccttttcagggtctcctgacgacctatactgcctgttgctctttttacctcagccagcaaagagataaattgtcaagattaagtagatctgaacatttgagaaggagttccataaaaaagacaatgaaaatcaagtgtaccagcatctttaattcatacaaggatcattttcagtttaacagtttatctccgttgttggttgtgacttcctgcaggacgtgacttttgatatattcattcttgaacttccaccaagcacagtttcaccatagttgatgctcagtaatagatccttatttgttggactgaattgctgcctactgaagtcaatcctagaaaggagagaagatagcttttttacatagaataactaggaggggttttcttcttttgaatgagctaccaataacaaaataaaactgcaatgaaagaattgacagcctggatctgtaatctgcctgacctgataattgtaaaaactgattactgtgtcagcctgccagatggatcttctccttgaaatgtaacgtgcggcacttctgaatgtgattcaagtgcaagcttccttttctctccccttcatgtttgttagtttgggaaagaagcagttttatttgaactgaacccactcattttaagtgtgtttaatgacagcagtatgtgacagataaaataaaatcctacggcctcgtttgatgtttagtttcagaccttagtgaaaggaaataggataaaacaatgttgttcaaagggagaagttgaaaacaaatgatttgttattacacacttagccatatctctccagggaaatttgggaagtcaaataatataaacggtaataatagtagtacttgagatttgtggagtgcctagcagtttgtcgagtggctttatgttcattatcacatcaagtctaggaggttgcctggccagaaatcatcatcccactattacacacacggttgagtgagttacgctaaatactacttctaaaatggtagaactgagcctcactcttggtcctgttgattttgaatggaatagttcctctaattctctgtgctggctcaccaaccaaacatgtgtgcagtacattggaccacgttgtggaaccagcctgttccttaactttactgaagcatatatatgctggcaatatacaaataaattatcacaacggatttcagcagtgagaagtatatgaagttgaacataacagccctccctcagtacccattcattttctcccctgccaaccccaactctttttccaaagagtaatcaccattgtctttttgttgtgcatctttccaagcatgtatctatacatttatgtatacatttacatatatatgtgtgtgtgtgtgtgtgtgtgtgtggtatattatctatttttttcagttcttttcctctggatcttttcatgtcagtaaaaaggatttgccatactatttttaattctgtatagtgctccatagtgtaagggttcatcactgagtctcttttatagtggagagcttcagcttttctttattacaaacaatgttaagatgagcttccttgcatatgtatctttgtgtacatgtgaatccagaattggaattgcttgtgtttttttttgttttttttttgtttttttgagattatcaaaattcagtgtgggccatcatcgcaaatgttagaatcctcatcttagctcatgttatcgacctgggtttccacttagttgcttggggatgtgttgttcagaccaagccagacacttctctaaacagacacttgtggccaagagagtaaatgttggggaagttattttccatggcactgtggtttgaatacaggcactcaccatggaagaagagtagggtattcttgtaacagtcttgtttacttaaaacagccacgactcttcgctgagatagaataaggtacttaacgcaataaaaataactaccataatttaaaaatgcaaatgtagcaatgcactaaaaaatacctttagcttattttttgttaagaaacaagtgttttgcataatcagactttaaaaaatataattgaattctctatactgattctatgataggaaggtccagagtcaggtccaccttccatgccatactccttctttccaccattcgcagctggtcctactgagggtaattagtaggggataatatctgaaaatgtaggtatgtaagagaatagagctaatctgcctagcttttatgatattacagatcgcagaggagcatcctcacggataattcccaaatcacagataatgtgttgttgtgctttataagcagagagacacaaaataaactctctcccctatccttctcttttatttatttattttccttctgttaatagatttagtcattttttaaaaccataatataccaggatgagccagaattatgtgtgtctaagttcttttaaaataaagaaatcgtttcttgggtctgttttagttaggtcctttcaggttgcaggaaccaagatgtgcttaaagttacctcagatgactttagatgatgggaatttatggtaatatacagggagaaggaaggaagtccaaaaacccatgtcagcaactagacaaccaagcctcatggagacttggaatatcattgaggacacaacagcagctgattttgtcattcctcagaaataaacatccagtgtttccttgtccggtgggtctttgttggacaaggacttagctttcttcaattttccttctgttttctgtggcagctcctgttagtgattctgtttagtcttcttctgaacactaggatgttcgttatatgatgtcctcctgcctcatggcctcctcatcctacgccgtgtgtctctggcttttgctccattccatctctgctcccagcttttctttttctgtatccttacactgaaaagcctgaaccaacaggaccattattttagctggttcttctccagtacacatggaggaggaattcttcctccaacacagctcctgggtatctagtctggtttgggttcaatgtctgatccaactagctgtggccagagtgcagaattacctgttacaaaactgtggcaatgtagttattaaaacaagcaactttttgagggttttgcttaaacagagtggttggtgtggtagagacaacattgtatgtacttctctatcacagagagaaatttataaagtcaaggcaaaccaaatatctgaggctgggacttcaccccagatgtttgcaagtaaacaagttgtggaccttagagatccgctcctctcactttctgactgcctcttgctttggtctgtagaccaatgttccactagtatttagttttcattctggttttaaaacggtttatctgtaaacctgtaatttaaacttctgataagcaaaactaacatagtaatgagcccattagaaagcaatcgtgagatactattagactttgataactttcaagaagctttattctatttttgcccattcaaagctaacatttttggcagttttaaaactgaacggggtttttgttttttcctaaatatgtttgtctgatgtatattatatcttattatggcaaagaaacttaaagtaccaaatagaatgaagacatatttgatattaaaataatgaaaaacattcaatatttgataacttcagagagactttgactaagcttcaaggttatttttataaacatgtactactggacaatgtatagaagtttcttagctcacagattttcactttggtagatgaggactaatgtgtttgccagaatgtgcacctcttctctatttaccgtaaagagaggtgtgggtaggagattgcacagtgtcacttagggcttagaggtgagggattttggaatagcttttagtttaacctgcgtgtgagaaaagaaggtttcatcgtgtggttaataggaattttcatatgataggaaaaggattaacaagatttaactttatattctcaataacttcccaattaaccagtgtctttgatgaggaaaaatttgaaaattatacagttgtgtttcttttcaatcttcccttgcacgattacaagacgatggaaaagtgcttacactttgattgctgttcctaataaccatgttagaatttcacaggtgatctggaatatcatatcttgactttcatatgtgggagcaagagtcagcaaacaacctttctgtgcttagagatgattttatacataaaataatattgttttgaaaatgaacattgatgggaactgtgtcatattttctgtatcatatttcatgttagctttattagttagctctcattacctcaccaaataactcagatttaaaaatatgtatcttaactgtgatcagcctaaggactctattcgatgatcaagtcatagtcaaatcacagtctcatctcttaatgtgttcctttgatcctcctcccaactctccctccaacattcataccaaatccttggatgtttctgcttagttcaaaaagccatgttctctcactatgtaaattataccaagaataccactaatcatatacgagaagctaacaatctatgcttgagttgtgtgttttttaatatcatgctttgggatatgatgccaaattggatctccaatttgcctttaattagtcagcaacacttatttaatgcccactaagctcagagcaaggcttggagggtggagaaggggagtaaggagatcgaaaaacaaatacactatcatttccagaatagttacagtatctttatgcatacagaaaacagataaatgaaaggatttagaaaacttaaaagcaaaatccaaatgagtgcaaattggtctgatacaaactgagctatataaatgcaaagaggatgcaaattataaaaacttgaagagtttaaaattgctatctttctacttttattttcataatactttgccatgagaattcttagatctcaggacaccatacccttcagtgaggaaagtttactggttcaattgtatgatttagagaaacaaacctaattcttagcattttatgggcttctgagagatgacgctgtaaaactttttgagtctctgttaaacttttctcgtcattaaagcttttatgtaaccttgaacaagttccttaacctctctgcgcctcaacttccacatcattaaaatggggatgataataggacccatctcataggattgttaggactattaaatgtattatactctattacttgtatcctataaaatatctttctcacagtttaatttcttgaaaattgaaacacatcctatgattgatgtggtaagaaaccattgtaacacatattaagtgacacctgttggttctttgttagtaggttagtagggaaaaaaaaagatgcagtttatagtcaaagccgtgtgtaaagtgtgtctaaagtgcttaaaacaaagcctgtcatacagttggtcttatagaatgatgctgttatcatcattgcctgaataccatatttgtggtatgtaaaatatttgtctccaatttcactggcttctgtcctatgaagcagatatacttatagttcctggtctttgagtaaatagagcctagaaggattatcagatattacacaactgccaaataatgacttacatcaaaccaagagtttattcctcttctcatgcatatcaacacctgtttaatctgatcatgttttcaaaaacccactagtgatctatttatttctagctatagctttcatcacctgtatttggtgatttgttgctggcagagtccatactcataacactaaatctgactactgtgattacaacagtctttctaagttagataccactaatgatattgattagggagaaggcattctttgtgatcctatttgcacgatctcgggtaattcacttactggacccaattgttagttgtgaaatgtgaatgttgaaagcagtgaatcttccagctgcttgatttgtgatatcactatcaatttacctactgaggagcttcatataaattggtcatttgtagaaagtagttcagtggctgagaatctggcataatattttatttttatgaaatttcagtaaacattattgagcaacttgtaggtttcaggctccacgatagggatgcaagcatgtaagacctctgtccagcaactgagaggtaaaactacaatgagaaagatagactggtaattcagatttatttttaaataatagctttttgagatataatatacttacccttcaatccactgactctggttttaaaggagatgattaatacattcactcaaccgatattgagcatctgatatgtgccagagacttcctatgtgctagggttatggagattgacaatagttatacaaaactgagcctgtcacaaaatgtgtatcgacagacagtcttccatttggtgctatagaccagtactcagggtcagcagagggtactctggaagcatattcagggacaaagcaaacctagtcttggaagatctgaggaagtttcctatgatcatgtctgtctcctgccataacaccctgaatgcatccgatctgaactaaactgaggtctgacaaacttgtaggagtttgcgaggtgagtggcttggggaaagtagagaggaagaagtttttctggaagagaaaagaaaatatgctgtggctctgaggtgaatcacatataatgcacaatagcttagtattgtgataacatttgggactgtgtgggcagacagtggctgcagggcctgaagggtggagagggggaacttacgcttcagtaggggtgtatatgtcttattatgaggtcacaatgaagattgaggtcagctagaggatgtgacattcgagttgggtcacaaaggatgtacaggagtttttcaaggctgaccacagtctaggcagaagaaattgcaattgtgaaaggaagatttgcgtgaaagaatggtgtttttggctgagtgaggaatttgaagtatctggaaaatggagtaagtggcacagagaaagaaaacagccaaataataataataataataataaattggtgagggttcggagagccgcttacaattggattcggtgcaatgcaatgactttatatgttctgtaccttgtccttgtaggcagttgcaggcactagggacaggagtctggggggaagacaggagcattgaaagtttgaggaaaaaatgagaagcatgctttagaaagataatctgaatatacttgaattggaggggccctggattgtgaatgaaaattagaagtatgtcatctgtattgtgtaggatagtgcttatctacaaagaattttatgtagaattccccatcagattaaccctttgcagcaatagccaattatttctgatattaaaaattataattaaataaaagatatggattggtaactaaacatttattgagaagttactgtatcacttccacaaatcaattcacttatttttcttagtaatccaatgatgtagcctgtcatttctcccatttttcagcagaggaaattgtggcccagaaggttgtatgtaactcatcgaggcactaagtggcagaggtcatgtttcagcctcggccatctggctccaaagcctaaatgtatgaattggccactaaaggcacaactgaaaatactaacagtccctgtgttagtgaagagggatatttggcaaaaagtttttattttgcttttttacaattcagtgatttgtaatttatttacagagtcatgcaatcattacctcaatttaattttagaacatttaaaaagtccatgctcatttgcttcccattctcactctaaccctagataacctcaaatctactttagtggtagtcagtttgtatgaatggcaacttcagtttaatggctttttttttttttgagtagtcacaatctgatagccttaatcactaattcaggagaataacattgtttgaccatatcatttctaacttctgcatgcaattagtgtactctattcataatttgatgcagagaagggtaaaagtgacaggccttgtggcagtcattggtcaaaggcatatgagtaagactgcctgagaccctaccctggagttctgtcttgcaggtaaggcacatagacaaactattaagcaatattggagaaagaaattattgtagaaatcctgatgtttttggtgaatggcttatgttaaacttctctctcctggaagtcattgaattgtttttaaaaacttagtatgtatgaagcatttggaatgcttggcattttgagaataaaatccacatcaatttaaaataaaataaaactccccatccagaatagagtagtaattgcaaggcataaaatagcccagctgtggagtggcttaaaggacaattggtctcaggcagagagtaccagataggacacgctacacaaaggactgtaatgtctcaattagtgtacctattgggtagcacatatatctgaaatggcttaaaataaaaattgcaaatgcaccagatttaatcaatcttagtatttccttctcttatgctctcagtccttagttaaaaataaaatttgcctgcctcattctcctgtgtgctagctagtaggattaactggagttctcaacaggaaagcaatagatctagtagacgacattgtatggtgggtgaaagcccgctagagataattatacagtcactcccactatattacccttcaaagaaactgagcctaatattctcctcctaagcaatttaaccaacttctaaaaaaaagtataagatattatttagagaatgaaatagctactgtatataatcaggaggaagaattatagcaaattatactcatttgataagtgtataaagagctacgctcaaagctttgtattgtacctcccaagtaattgttcagttgtgctaactgtccttaaaaaaggagaagagataaagaactgctaaagaaaaaaaaatcaatcattatacttgttcaggaagattttccttctgggcaaagattaagtcttatttcatgctccatgaggatcaagcacacatttggccctcccatgtttagtagtggtgatttctttgcctttctcacattcatgttcatgtataaacatagacaccaatataaaactaaatgcaataaaagtgtgttttaagatctaccacatgtatgtcctagtaggtatagatagatgttatatatctgtgttcactgcacttacatcccaatattttcagaagataggactgtatgcaaatgtttccaatatctctttctaggatcacaaaaaaaaaagaacccctgaggtctttctacttgtttcaaaaatgagctggtagtaatattagagccaatttccttttggtttgctttaaacaaaataaacagcccattatgtaaactgtataagacttaagtgtttgagcacttcccttagagtttgtaagtcttatgcccccaccatcaaaaagtaaacaaataaataataaaaagccaatctaattgttattatgagaagtcatacagcgtatttgctaagagcagctcctctaaagatgtcagactgccttagatggaacactctgtatcctccgcttgccagctgggtaacattcaacaggaagcttaatctctccatgcctcaattcctgacttcaaaattattgtagtaatacaatgcctacttcatacagttgcggagacatcagttaggcgctgttcctctcacatatgtcatcaattctgagaccgattcacatgcttaacatttctgactaattactgttacgtggtaatcatgacatagcggccattgtctgtacttgtacatcaaaatctgctgtctatggagattagtgacttggaagaaaatcctggagtcaatagtggaccccttttttattaagactcttgatggcccagaggtcagtataatgaggaaaacatagaacttccatgattttgacttgaaaagtaattcaaagggttgaaatttaaacgtaaagaaatttttggaatgctttcatttgttgcacttatattttgctttttatgtatgtagaggggtgacatatgataaaaaaactatggataattttaagccatttatttcaacaaacatgtaatatatattctaacgacaaagccctatgttataatttaaatggtagtaatttttgtttccggttttgtaatagctaatggtgtattttataatcagtagcatctttgatttgatggggtagtgtagtaagaactcaataaatgttagactcctcattaggatttgggtagaggttaatgtcggtagacacattattagagttaagggtcctaaggctttttaatgtgagcagagtgcaatgaaagaatattttggattgaccaaaagtctagagaacctgatttgtaactgtatcattatgacttactgaatttcattcagtaaatattgcatgaaattgagctgaaattcatgtctgctaaatatgtgtactctgcccttttctcttcattatgaggattaaattgaatgataggggtgtaagcactttgtaaatccaagtaagaattattagttaggatagttcaggtagtgctgtagtaacaaatacttaccaaatctcggtactgaaaacaagggtttatttcttacttatgctacttgttcatcataggacagaaggagttctttgcagactaatagttgtcatttccaacacttttgacctccatgccagagtaaaagagctctgagggtctcaaactggcaattccacactttgacctggatgtaatacatgtcacttcttatatagctccttagccaaaactattcacatggccctacctagccatagggttgccacagagcagagagctggaaatatgtggagaacagtgtcaataagtttgtaatagtaataatggttgacaatcattgtgtgcttcttagtaccaggcactgttgtaagtgctttagatgggtagagtcctttagtactcatcaagtgggtatgatcatgattcccattgtacagatgacaacccaaggcacaaaagggtagaccaacctgcacagaagagacagagcagggattttgcttgtgtgacattgatgtgtgtctcaaactataatggatttgaatgcattttttaaaatgtaaaaggaagatacaaatatagttgagaatcttctgttctgaaaaataagagatgaggtttggtgatccccaagcctccctaaaatttcacctggatcagccccaaatgacctacacttacaatgactgctgtgttcttttggcgcctcatcttcagaaaccaggggccctctcctggccactgacttacgtcgtagcttagcagaggggcattgtcccagcgtttcggtagatacttcctcctttgacttatttaacctttctattttgggagttttctaacgtgtagaagaacagtagagtggccacagtctactccattatcaatgatcaatacacaattaccaatacattctcaatcttgcttaatttcactttgcaagttaatctggctgcttgtcaagctgagctgtgaacacaaactgtgttcttggggttgcggggtatagagctcctaaaacaggaagccagtgaccaggggagggccagagaggacatgtggaggacagaattgaagggcttcaactggaaaagagggcgtctctaatcaatagtttagacaagtttgcaagtggaagataaatgatatgacaatatttaatcattcataggacattcttgtaatgtaagggggaaaaggagaaatatgttgttaatagggagccagaattattacctttctccgtagctccaactgtaatcttgcctgctattgaggtagttaataaaccaaagcctgtgagctctgttcaatgggacagcaaccagagaggcttctttccaagccctcccaccaggccaagaagcagctgagctggatagaaagcatgccttcagcaccctgggtttcctcttcagtggcatccagaggaccctgggtcacttcacctctctgtctctttctgaaaaacgtatataataaccgtctgggtgactcacaaatctattatagcatttaattaacaaatgttcctcaagtgctttgagctccctgtttggatagatgtgactgaaatgtaaaatacctttcactgccttatttattgctccagcgaacacgctatatgctggcaccatttatcttcattttaattttatctcccacaaatataggcattaatttaaatcacatacagaacataacagtttttatagaggcaaacttattccagtgtgctgcattttaatatcgcactttaccatcttttctcacttgattcaagaatagtatctcttcctgcctcagcatttaatcttaggacaacagaaacttttttgtgtgtgcatgttcttgctctcaaactttgtttctcactgctttgctgcttgttgcctgaaagttgttctgtcagtgtgagcacaggtgtaagtaattccatttctcttttgccagcgtaatttcctgtgtgtgtgtgtgttgtgggggctaaggggggtgtgtaacatgatggattttacagctgaagcttatactcattcatcttcagatatcttttctaatagaaataaagacaataaaagtgataccctcctcctgaaatttacacattaaagaccccttcaaactgctcactttttttctgtcttttttttcattcagaggcaaaatttccccctttttttcatcactgttacgtttgcggcagatgagtctcttccttgaggggaatcgtggtaaatgggcctgctgtatttacagctatgaaacattccagttggctgtcacaccctaagcaaggaaggtttccccatccttaatttgcggcctgaaaagctgtggctctcctcaattaagactttccaaattgcctctgacatggcagcatattcccaggagtcaggtcctgggaggcagtaataacatgagcactgctgtataacaacgtagttttacaagccattttgtgctcttttcagaagctttcaggatgctttttctctgaagttgtaaattaaaaagaaaacaaaacttattttgattttttgtttttagttttcctagtctctgaatgtctaggtttagggacatctgtcatagtcttatttatttattttacgtttagtctggatttaaaatgtacaaattaatgtttaagttctctgttttattcctgtaacaatcctacaagaacaggttccattattgtgttcatcttgcagatgaggaaacaaggcctagagaagttaaatatttttttctgaaatggtacagctagtacgtggcagggctcagattttggatccggtccaccttaactaaatatgcttttgatgtagctctcttcaggctgaattcttgacctctcatttgatgctgactcttctcaaacccttagtctttgtgctactaggtagattttatctgtggcaagaacacggttaccctggaaacccactagctagaatggcaagccaattatagcaccaccgctttttttaaattaaattagcgctgctgatgacgtggacttcttgattgaagcatgctgagaaatgggttctcaccagttgttcctgcctcttaggatcatgtgggatcattctcatctattctatcaagccaaacaagaaaatgcctctatgtgattgactggatttgaggaataaaatgtgatgatcttttaggaccctgagctttcagtagtgagtagacatgcatggaaatgtttggaaagaagccctattggagaagaagcctgtcatctggatactttccacccccaagcacacaaggtccactgatttaaagccctgctcttaactactgaggctaatgttctctattttagtatttcttattttatttaaggccattggtttaaatccagacttgattcaggaaaggtcgtagccctttgatattctttggtctttgcacacttctaatagggcaggaatttgctttagttcaaaccaattggtgcatttcctttaagtacacagaatttaaacaattgaattgatatggccactgttgaactgagtggtaccaggttggaggaaaggacattcattatatgttagtgggttgtgggctcactctctgagatggtaaacggtaggctggtagaatgttgagtggttcattctgcataacacacatggcgccaggcacattacctagtacctctatgattttcatccgctttattttctgttttgtagagtaggtaaaggtaaggagacgggcttgctcatttgcaaggctattctgtgatgcagggttctgagtacaggattccttatttgcagtccagtgctcttcactttataccaccaagtcaccagagtctcagggcctgtcttctgtatcgcagaaaacaaatcaaggattagcaacactgaatcttaattcttgaagttctaacaggaaaattatgttagtcttgctacatatcgtaggcatattttgtccaaaatgagagtaatcagggaggagaagaggctgcatcttactgtgtcctgatgggtgatacttccgtgactatctccatcaccagtgagcagatttccagaagtcacagttcaaaacgatgaagagaattacacattttcagaaaacattgtacattctttgttaacttttccacttgtaaaataatttgttttcagacatccaggtcctttctccatgatttactgcgttggtgacattaatcagcgtggttatcttggagcctcatttccccttgggtaaaatggaaggataacattggcaatcatacagacgtgttgtgtagaaaggagtaagaagcattttggaagtggcaaagtggcaataatcccctgtaagacagtagctgtttttaagatcactgagctctcaaacactggctttttctgcctcacactttctagatttgtaagacttaatctgaaaatatctttgctattcattatgtataattgtagggctttggatttaaaaaatcctaattctgttatttccctgacaataacaaattattctcatctaattttctcttatgtgaaataagacatacaccctagttacttccatgcctaatatgattgacaaatctatatgttatctgaattgtgaatatattttcatacatatagaagtacatgtgtgtatttcttgaaatctaatggtcaatatacactaaccagttatttctgggattttgggaacaggcttctttctatacttctctacttatctttaaattttctctaatgagcctactttgcttttgttttacatacagtaattaatatatttataaatgtatgtatactatatattttaataaatttatataagtatatgtatgtatatacatatgttttgcaagtaaaaaaactttagtaataaatatctacaaaggcaaattaaaaactattacattttttctccctcccttcctttctactgtttccctcctctcctctctttggtttccttccttcctttgttccttcgttccttcgttccttccttccttccttctgtccttcccttccctccctccctccttcctcccctcccctccccttccttcttctttcttgccctttctctctctctcttttcctctcccccttctgtcttcctctccccacctccatctccctctctctctcctccctccctgccgccttccttctttccagaaagtcactaaccagaatctttcacagaataaactgtgaaacctagatcttaaatgtactacagtagaaaaagagatgagatttttgaaagatgatggcttgtccttgtctctgtacttgaatctatctcaaaacaaagatataactattgtttttaataataatttcaatatagagtgaccatccttgcctactaccctgaagagagagagcatttacacataagactggtggttgcagtaaacccctttcaagtggagtggccactatggtccttcctcttcccttccttcctttcattcccttgccctttccccactttccttctcttcctttccttttttcttttaaggttcataaaatcttgattggcctccttcctagcagccaggagtttgggtccctaatagctaaagcttatatactttattttcttctttctccagatggctgtggctatgaattttactccccatcccaggactacccctgctatactgacactaattttcattttataatactgtcttcatcagtccatgctatgctactagttttagttattataatattaacttaatccacaatgaaggcgacaggtttttttgtgtgtcttactttttaaaggggaaatattatctctcactttaaggaaactaactttagcaactcattccctcacttttttttttctttcaacttgatttgttcaactaaggagaccacatttagtacttgctagctgagacttctgttctacaattctgagttagttcctcatccgtccgaccctctctccccgtggtgcactgagtcacaatgtgatcaccagctgcatgtgctgctattacacacaacacattggctagcagaggagccaggattcagccttggaagtactttcaggcaaaggtgaagaccctttccccactctaagcatctttcagtagtttagtgtagctgatattaatgttataaatggtcattcctaatcctgtctcagttccagcccagatggagttttgattttagaaaatcattcagtgaaatgtatttcctgtgcctggtagtcattgatcacttaccaaaaaaaaagggggtagtgggagactaaaaataaacttatgataattcacatacacttaacctttactgactaataccaaaaagggaatgaagcaggctctgctgaccagcacttgcagatggattccaggaacgtggctagagctgccaaagccatcgctgaatcctgccaaaagcatcccaggggattttactaagggtggggagagcagggaacatggaggtgtgtgtgtgaatttgttttaaaactctcttactcaacactgagcagtgggaagaacactgggaaaaaaggtcggaaagtgacattctagactgggttccacccaatctctatgacactggaaaagtaatgtgtcctctttggaacttcaggtatcatgtgaacaataagggtgtcatattaaggtcttaacatgttgaaatgttaaaaacattctgtaattacttaaattatttcaaaacagaaagatcatacatgttcatcatgtttctgtgttaactggacaaaactacactaaaattaaagagcaataaaagcaatcgtgttaaaattttatttttaaatatagtacttctagtaactgaatatctaactttattaacaattctaaatctcgcttttttttttttttaaaccccagtgaggctgggcaccgtggctcacacctgtaatctgagctctttgggatgctgaggcggtatgatcccatgagcacaggagtttgagaccagcctgggcaacatagtcagatcctgtctctacaaaaagttttttaaatagccaggattagccaggcatgatggcatgcacttgttgtgtcagccactctcattgggggttgggggggttgggggtgggctgaggtaggaggcttgcttgagcccaggaggtaggaggtcaaggctacagtgagccatgactgtatcactgcactccagcctgagcgacagagcaagaccctgcctctaattaaataagcaaatacacacacacaacacacatatataaaataaaataaaaaccccaatgtgttaagatctcaggtttaaacctcggcttatacaaaccatagtactaccgtgcaataactgaattgacaaggtaccaacacctattttaaccagaaaaataacataattgtgttatattttccatgagagtcatactcttgaaattaagtattttctcaatagaattgtttctcaattaaaaaaaaaaacttactcaaaacatttagtatttaattataattataggcagataaaatttataaaagattatcagtaagatcaagaacctctgcctctttaatcatgtttttctctaccttttgctggtctcttcctgattttgatgacctcattgtctatacgagtattaagacatttggggtagctttttatgttgtgtactttctttccttctccttatgagatggctgacaccttctaaaggattcagagagtttccatcttattgaaaggtccttatgaaaattcactggtagtgttctcagcttatactaggaaggcatgtttcttcagaagcagtatttgttgtatttagggtgggaatcattatgtagcaagagtggtctacatattggtcttgcagcaacatcagcaccccttatgaatggtttgtttcccaccaaaagtcaaagattagcctatatgatggatgatggctacagaaaatagtgccagaaaaacagaatcagtagaagatatatattaagacattaattgggaaggagtagcttgcatgattttgtgggctggctaggcaatctaacatctacagattaggcaattaggaagggcaggctgtaactccgtggcatgagatgaagctacttgccacaatgagaattccttcttctttaaggaatcctcagctctacttccaagacctttcaactgattgaatcaggctcaaccaggttatctagtgtactcttcattacttaaaaatcaactgattagaggctttaatcacatgtacaaaacaccttcccagccacatctagattggagtttgattgaataaatggagactttagcctgaaaaaattaacacacaaatggaccatcacaggagggtagtctttttctacagaatttaaatctgtggtagagaagcaacagatacctcagggcaaaaaaagtccaggaagagcataaaggttcaagcagaaccatgagaatgccagcattgtcgttggagatggtgactggaagtgatgataggtctagggaacagtaaatgtggacagactggcattttacctcgggcacacttggacctggataggctccaccagtctgccctggaaacagaaccacagtgggtcagacagtcttttgtattagttttaaatacagagttgattgtctctcttgcattcttaacttgcaatttagtactgtttatattctgcttgaaggttagagacattcgactaaatggtcttttctccacattgctgtcattcattaatgtcctggtcctggactttactcattgaccacaggacaagtggctcaactctctcctgccactacccaggctgttagtcctgttgggaggctcagggcccaactcactcatctgtaactctcatctccattcagctgcagcctctacagcccctggttataccctggatcttatcattgcttcgctctattttacctcctaaatcgtaaaaattaaaaccagcctcggaacacaacccctcattcttccagcactctctctcattcaggtaactcctattctacttttcttcagcatatttaccttctattacctttctttttcctcaccagtctcttatatttcctttattatccaacttacagtctgtggttcaatacttcagccgactcttccaacacatgaccttctttcggtaggcttttttcagagtttcccttttgtacttgcccttatgtaaatctgtggcacagtcaggccatcttgccaacttttcacagttattgcacaccacactctgttggttttcttcctaccattctgaacaatttcacttcagggctctccttagtggctcttcgtctccctctccttgaatgtcgttttacctttttctttttcttttttttttttttttttttttttgagacagactctcattctgtcacccaggctggagtgcagtggcgcaatttcagctcactgcaacctctgcctaccaggttcaaacgattctcttgcctcagcctcccgagtagctgtgtctacaggtgtgcaccatgcctggctaatttttttttcttttttcttttttctgttttctttttattagagatggggtttcaccacgttggccagtcttgtctcgaactcctgacctcaactgatccacccacctcggcctcccaaagtgctgggattacaggcatgagccaccgtgcctgggcttgaatgttgttttcctttggtggggcttggggaggggtgtctttcctagggcctgctcttgtttcacttcccacatttggttaagagagcctttaactactatggcctcaactatcagctctacaatatgatataaatttgtttcagtaaacttgctcttcagattcaattgtttctaactgcttatcgctcaggtgcatttggatgtattgcagaaatctcagcctcaatgttttcaaaataaactcatccacttctctcaggaattttttccactccaatgttgttcggtatgtggcatcaccatctaaccagtttcctaagccagaagtttaggtattatttctaagccctctctttcccttattatcaattttacctcctaaatatttcacaatctttctacttctcctcatttctgctgcggtacgtgatttcagatcagcatcatctttcatggaccattggtgatatccccctaacgggtttccttgtatccatttccccaccatcgccccaatctatccaccaaggctttcctaaaatgcaagtctgactgtattactttcctgtctaatatgttatctccttattcctgtagtataagacagtgattaggaaaacaggctctgaagtcaaatagaaatgagtttgaatctcatataactatgtgatcttggacaaaataaccttttttggtttgttttccacgtgcgaaataggaacagtaattgaacttttctttttagatgttgcatacctctctggtatacatgaagaagatgtgtagtatctcattcccaccccgcttatgcaccatgctatagtcacacactgcctttgctctgatccccagagacattgagccaccactggagagtcacatgatattgtttttagcctggaacattgttcactacctcagtcttttattgccttgtctcaacatagacgccatttcccttaagacattttcagcacactcctctggtataatttagtttaaatgtccttgctgtgttctcctgtgtttttctccttgaacttcctaatccttacaccttccaccctgcaaatgatcattatctcactgcctctcccaaatgataacctctttccacccattttaagttccatgaggacgatgaccattgacccggaccgcgttgttaaacttcttagtctcagctgccaagagcttagcacagtgtctagcagagatcggacactcagtaaatatttgatgaatgtttatagtgtgactgtctcgccagtgcacatacaacaaagtgatcccatctttccttctgtatcataaaatagaattttcttacctctgtaatttctccctaggaaccagactgcttctagagagcttcttcacaaaatcaaattaattggtattttacaaggagggaaagccccaggacaagtcccttctcttgaccacaaagttctgtgtttctcatctttcctcttgatgtcttggtttcagcaaagcaacatttctatccctgccccctgctcccccataatcctacaaatgtactatagatatgtgtaagtactacatccccaatcaagtacagcgtttggcctcgggtgggagtcaaacagcaagctgatttttaacattacttggaagaaattttctaggtatataactgacaaacattcatggagagctacttcatttttctgtcaagcttttgggggattttttttaatagttctgcactttgaaagaaagttcacaatttttaaaaggaaatgtggcccttttcattagctccttttacctcatgctgagtcatggatgagagagaatttgtaggcgggtgagctgcaggaaaagtaatactgtcatttacacttgcaggctgttatgctttccagaaaactttttccgtaggttgcgaaagtgattaatctgctgttaaaactgacaaagaaggttctctgataagagaaagaattaaatgaggaatttttctttaaaaagtaagcgcttctttcccattttagattagaaaaataagtttaaatgtttcttttaattttagtcgtgtgtgtgtgtgtgtgtgtgtgtgtgtgtgtgtgaagttggccatgacttaatacaatctcaagccattttctatttaaattatgtttttttacttattggcatggcttattcctcatgctgtatatctaaattattcatttctacatcctgttcccttgcttgtctctctttcttcttctttttttttcctttcattttctttatttgggtcttttcaatactttcaacatcatcttacttcggagccccagatctcttcttttctaccaaccttttttgaaacattaaaactggtgaagatggcctgagttctctctgtgatataaatttatccctccctgaaaaattccattcatgtaacatttttataacactttttaaaactaggatgaaagttttttcatgtagttgaaatgaagcatcactgcctaaagcgtttagaaatttttttactgttggttttaagaaattactctaggatttccactgaggactggcaagtattggtgaagtttgatctctcagagctcatgtttcagatggcaacttaaagggacaaataaataagtcaatcacacggcataatctaactttaatatgattctgcagagaaccagtgactcatttagagaaatcagagtcctcagaaaggtggaaaacatgttagaacttattaagcttgttgcctttagcatgtcaatgccttgtttttataagaagattcaatgggttgttaaaatgcactgtcttaaccctctcccctttgtatttttctactcttaagatgcatcattttatgttgggatctatcagtttattttacttgtttttccttcttcctctccttattttgaaggctgacttctgagcttgagccatatccttggcaactgaatgaattcatggggagtatagtagaaaagattttctcacaactctgacagcactgccccctagtaaaaaagggaagagacaaagagaaatggtcccttctgcaactgaagggaccagcacaggggacttggcattcttcttttagtcctaaagcttagacatacatactgctttcgcccctgggctacaaatacatgttttaaaattctgaagttgaaaacgtcaaaaccatttacaattaaaaacctgctattactgtatatttatacaggtatttcataagggaaaaagtagaaaacatgtaaatgtatttgttttatgtctgaagttccaagattatttctgtttctttactgaatgtgtttgaaatatatgcaaacacacatgtaaacatacctgtatatttatgtacagatataagtctacatggagaccagcatttttagataacactgttttacaggctgtgcatccatctttaaggtgctatagcataaggtctatgactgcattttgtaataaaagatggcaggctttctggaaagggtctctttggggcaggaagaggtgtgaagatcttttgcattctacttttaaagtacaacaagttaaattgctaccagatacattagctttatggaggtttgtttccatttttatagcaaaatcaaataacttttaaatcagaggaaaaaaatattcttttgttgtttttatttttgttgttgagattgcctgttttacgttgagtgcagtgtttttcaggtggaaacatattggtttgacattttaagaggaaaatgttctatatgtaatatgaaagagtctttttcttaactaaatgccagcaacaaaatttaaaccaaaaaatgtagtaatgaaacaatggtaatgagatatgattatggtttagtgagagaaaaaagccctgcagggaacagtacaagcacagtaaattatgaattgctactaaataggcctcattagtccactgtggaccatgtttaattgatattagaaaggagtctggaaaactttggaaagtacatgtaagacaacttgctgttaaactaataaaagtcgttagagtgtctgtttcaaaaattagtaattattaattgtgtgtgagggtcctcaggcagcacccattttactaaaacatgcttagagaaaagatatttctatgagaaatgaaactgcagaatgctgagcagtgtaatatgtgacagttccctgggagtttctcccctcctcgtaggtatttttagcaaaatagtccttaaacattgttttttttttttttaagttggagtctcgctctgtcgccaggctggagtgcagtggcccgatcttggctcactgcaacctccacctcctgggttccagcaattctcctgcctcagcctcccgagtagctgggactacaggcacgcaccatcaggcccagctaatttttgtattttttagtagagacgggggtttccaccatattggccaggctggtcttgaacacctgacctcgtgatcctcccacctctgcctcccaaagtgttgggattacagacgtgagccaccgcgcttgccccttaagtgttgttttaaagaaagttggcgctctggccgggcgcggtggctcacgcctgtaatcccagcactttgggaggccgaggcgggtggatcatgaggtcaggagatcgagaccatcctggctaacaaggtgaaaccccgtctctactaaaaatacaaaaaattagccgggcgcggtggcgggcgcctgtagtcccagctactcgggaggctgaggcaggagaatggcgtgaacccgggaagcggagcttgcagtgagccgagattgcgccactgcagtccgcagtccggcctgggcgacagagcgagactccgtctcaaaaaaaaaaaaaaaaaaaaaaaaaaaaaagaaagttggcgctctactgaagactggagcccaagaagacatttatagggattgtttattttcatgttgttactacactccatggtctgcaaaaccagagtgccagatgttaaattctatcagcataatgcatctttaattaaatattatatacgccatacaattaataatgtggtctgtttccaaaactttattaagaaattaccataattttgtataataggctaataaaaaggcactgtactttgaaacagcctttcgtaaagtggttatatgatttgtatctgttgaatttggaatttagattaagagattgtgggccagaattatctgatgcaatgtactcaggactttaaataagttgcgaatcttgtagggtctactattatttggcttcctttaaaataaaataggtttcttatttgtcgatgagctcactctttaagaggtttagggaataatttacctactcgctttgtgtcccccaaccctactttgtaaaaacctcaaacaatacaaaacatgataattccaaatatacagtacattgggctatgatatttcttaatgaatggaaagtcatgcatctggttctgtggtcatcattgatgttttaattttcacaatgtgttaacctgatacttaaattcccctagttgtcctgtgaagaaagaattttaaattcacatttcacatgcagacaaactctgatatttaaaaataatagttatcttttaaactgagatcctatgtggatatggaatagcgtatacagctctgacaatagggcttcagtaaaataacattttgcaagctgtgtttttcaagacaaaatgtcaccctcagctaaacagaagtaatttgcatcagaggtgtgtgtgtccttactcttaatgaaaaaacggtcccctctcttcagaaagtatttgctatctctacaatgtattattttcatcactgtgtccctcccctgcccttcttatgccctaatatttgtcccttaattctattaaattagttgtcaactaaaattaaaggtagatgttatccttcacaatctgtcctggtctaatttttcagtcttgattcgtcttctttactttatggagtgtagaggtggctaacagaacaactctggagccacaatgtgtagattcagataccaacagtagcttatgctgaaacctgggtcaaattacttaagctcacatacctcagtttcctcatctacaaaatgaggataataataggttcttcctcacttatatgtaaagcatttaaataaggactagtagattgtatgtactagctgttattaaattctgccacatttgtttgttctccatacacaccttagccttttgtctatgtctctgttcacattgtttgctggaaacaggatccacccttctcctccaaggccagtgtatgtgtgtccacaaacacacagccatccatgtgttgtgattccacgcacctccgaagatacggctcagagagccaccctctgcttgccagattgagcatagttcatctggaactttcatacacttctctgtcttacttagcatttgcaactatactttatagttattttcaagtttattttgcctcttttgctggtgtgtggacttcttgagtccatggacttcctgtgataaatttctccctactacaaaaagctcagtgccttgtgctgagctgctgtgcttagtaatagataggggagagggtgtttttttatatctatatacatatatatgtacatatatatgtacacataatttgatatacttttgagtgtacatgatgtggttccttatttttgcattaagcctatcacttccgggcattggcaaagatctgaaaattaaaaggaacacaaataagaaatgcatttagtccatttaagcaacatgtgagttcctcttattgagtttcttccctaatttagatctcaagttttgcaaaagaatgacaaattcctttatttaaagaaaaatgaaagcagatctgttaccttctgtcctatgaatgccaattctctatcctggataattagataaataagatatgtataagcgtatggtttatgcacatagacatgaagctctcaatgcctgcatgattttcctgtcatgctcatgtgggttaaagcccaatagatgtattttgaaaactcgaatgccagtatgtctttaaaaagattatatcctgaaataaagttttaacatcctgtatcctatgataaaagttattttgcatttttttctttaccactgaaaacttgcgaggctcaaagtagtttaatttttatatattgaagctactcatttgccatattttaaaaacaaatcataaaacatggtaattggtaatttcacaaattttatcagggaatattttattattacatttttaaaataaaacctgtagatttatttaaaaagcatattttgaactaaagacctgaaatgtgtagcttgtgtagctccatttgaaaagatgaaggttttgctattgtttacaacagttttgcctgatttttgttttccccttttgctctgtttttgtagttcagtttgttgcagcattgttgtcatgtctaatttttgtttacgttgcactgcacagcactctttcgtatacttaagtaacctttcttgttctgcactgctgaatgacagctcatttattctagggtggtaattgcagtgtagcagacccaggtgagcaatgtaaaaagttgaagcagataaaatgtatgatttcttttataatggtattgtgtgctgtgttctcctcatatagatgctttttgtttacatagagaatatctaggaacaatctacatgttcttcaagatcttttaaaataaatactctttcatttttaaaaaagatgtattcttggccaggcgctgtggctcatgcctgtaatcccagtactttgggaggccgaggcgggtggatcacttgaggtcaggagtttgcgaccagcctggccaacatggtgaaaccctgcctctactaaaaaatacaaaaattagccgggcatagtggcacatgtttgtaatcccaggtactcaggaggttgaggcaggagaatcgcttgaacctggcaagcagaggttgcagcgagctgagatcgcgtcactgcaatccatcctagacaacacagcaaggctgtgtttaaaaaaataaaaagacataattgcaaaagaagtatttcacttcaccctttattataggacagaccacagtgcaagcaagaagataaatggttaacttacaactgacctctgattggagaatactagagagtggtgaagactgtggcaagcaggagggctcaccaacctcccagatttaacccaggctgcatgtaggaatgcagacccagtgttgctaggtctctggaattaagttatatttaactagcctgtgatctctaaggccttcaattatgaggttcagcaccactggaaaactgagtcagtttagtgctttatttcacaaaggcaaattgatggtcctttctgaccctaaattcccagttttacttaaactatttagacaaatctaagaagtgtgtgaaataaatacagtggagcttgaggatttttgttgttgattttctgtccttttatatttcctccttccctctgagggttcacataggagcctccacagccagaggattactttcagaattggaggcaagattatttcttggaattttggtctgaggaaaaattatttaggtcacttggacacttatgttgtgctttcccacaaaattgtctagcattttctttaagacatatgcatgaccactgcccaaacgaaataaatcaccctttctcttaaaggatccagactattaaatatgaagaacatcaactaatttgactagcagaatgtaggccttcagtgttaacatagcctttttctgttattgcatttatctgcctttgttctgaagccccagtctagtacctttcttaatgcagatctctttgagcataatgtttccattaaaccagccagtggatctcatttgctccatacatattcatattaggaaatattattgtacaaagtaaaagatgctagtaaaagatatgctggaacaacatttctgacagtatttgttctgtagttaatgctctgggagcctttttccttcaaactctctattcctagttagggcctcatcatttcttgcctggattattgcagtagcttccaggctggcttcctttatgcccttcataagcatatggctgccagattaatatttttttcaacacagccctgatcctgtcattctacaattgagttcctcacagtctacctgatacagagacagaaggaatgtgataatacaaataataatggtactcacaacaacaataaatgactggtctttgatatttaatctctaatatcaattgtcttgagacaacaaggctttttgaattcaatatcagagggtttaactgtgaggtacttggcatgggtctgaattgcatgtatattgtatgactgattgaaagaagattatctgatacacatgagaagtgtggaggtgggagctgacattttgttagaagtgcatgcctggcattttgatatactattgcacctcctcaaatctttttaacagaaacaaactactttgtgatgatagaatagcataatacaggacagcggaaaaatcttagtgctttttgttctggttttgattttgcaactaaatatgtatgataaataggaaattagtgcattggagcatatgcatctgttaaagcagattgactgcttggttatcacactataaacaacatttttgaagaattttaaaatttataatctctgatataatgttaaatgaaaaataagatacaaagccacacataaagagggttcacatttaagcaccatcacctatacaaaacacacacgcacacagtcacacacacacacatacacacagtcacacacacacttacacacagatacaagtatacatagaaatacaaaccatgaaaataaagttaccaaaacagttgttatcactaaagttttgaacgagtgttttttatttctttattaaccttgttattacttctcatattttctacaatgagtatcactgtttttagttttgtttttgttttttaaatggagtctcactctttctcccaggctggagtgcagtggggctatcttagctcactgcaacctccacctctcgggttcaagcaattctgcctcagcctcctgagtagctgggatgacaggtgcccaccaccacgcctggctaatttttatatttttagtagagacagggtttcactatgttggccaggctgatcttgaactcctaaccaggtgatctgcctgccttggcctcccaaagcgctggtattacaggtgtcagccactgtacccggcgtatcattgttttaatgaatacactgtcttacacgagggcttgcctagctctctcaaaagtctaagaaacaatgaataatattattttatttaaacattatttaaaaacatgaaaacagtgaatacaaagttgaactctcctcttacaataataaaaattcttcttgaataattctgtatcctaccattccatgaattgtatccatggaaaagtgtatgtttttctgattcatttatttatttgcttctaggttattggatgaagaaatctaggaatagaatgaataactgtatagattacacctctgatgcctggtgtgtgtgtgtgtgtgtgtgtgtgtgtgtttcttcccttgtgattttctctccttttcctgcctaataatgatgtagctgatctgcttatcatgttcctttatttctataattccaattgttgtagatcccatagaggtgttcactcttgctctctctctctcttctctctccctctcacacacacacagattaaatagagaaaattaagtaaagagaggaaaatgaggaataatttcatactttaatatattcattcattcattgctctttgataatttttttcttttttaattttatttttccctaagttattggggtataggtggtatttggttacattagtaagttctttaacggacatttgtgagatcctggtgcacccatcacctgagcagtatacactgcaccatatttgttgtcttttttcccatgctcccctcccactctttccctcaagtccccaaactccattgtatcattcttatgcctttgcgtcctcatagcttagctcccacatatcagtgagaacatacgatgttcggtttcccattcctgagttacttcacttagaataatagtctctaatctcatccaggtcattgcaaatgctgttaattcattcatttttatggctgagcagtattccactgtatatgtatacaccgtagtttctttatccactcattgattgatgggcatttgggttggttccacgatttgctactgtgaattgtgctgctataaacacacgtgtgcaagtatcattttcgaataatgacttcttttcctctgggtagatacccagtagtgggattgctggatcaaatggtaagtagagctctatgatgttttgatactcttctatggcatagacttagtgctcccatgttctaagtgttatgaaaggctgaagataggaatattagaacatggcccccttcctgagttatatagcttagaacaatggtactcaaacttaagaatgtgtaagaattacctaggccatagcacttacacatggaatatcaagagggagaacagactaggagaagacgtttgaattcagctgcccatgtaaagtataaagaattatttttacccagaatcttgaaggggaaggaactgagtcacacagacaagaatgtgcctaaagcaattcagcagttcagagtggaatgaaaaggaccctggttccctgctcttaagccagtgttctttagctggctagaactcagctctctgtttaaaaaatgaatgggttgcagtggagcgctgtgttccaagtaggatttgtaagacttctggaattctgaaaaaattctactggttttctgcctgtttctctgtctatacttgaattcactgaggccaaaaatggtaactttttacccagtagctggcaacattcctggtaattagaaagtgatcagtaaatgctcaatgactatctgaatgattgcatttttcaaaaagaaatctgaagtctaaattttgagccaactaaacatcatatttctttggttttgggtggtttgggaaaaatccaatgtgttctctgaaaggaaaacatatttggagatatgattatttttttctgtaaataaagttactttgttgtaaatataaatatacatgctcattttataaaagaaaatgaaaggagaaaaaagagcaaaatatctgtattgacaccactcataattaccactcataatttttgttttgtttttcttattcacatataggacttttatcatgatatatgtatgaatttatatcctgttatttttctgaaacattatagcataacaggattaagtatcctattacctctacagttcctgatatttataaagataaattatgaaaataatgtttgaatgagaaggtttttctgtttatatgctgttccaaagaaccttaggtatcagaatttatctgagcccaaaaacgtcccttaggtaccttaagctacccaaattctttgaattctttcaatcaaatcccctaattttataaagaggaaattgaaacccaagaaacaatataagtgaatttgtttgaacccaggaatttcagtacttgttgtcctaatttaaaattgtgtcccaaagaatatttatctttgaatttgttgatgtttgctcttttaaaaaggaaagaagaataataaactaattcctcattttacctttaaaaggaagtttcactggaggaataagacccaaatgaatgaacccccatcagtcattcgtatcccccagctgatgaggatttcagcagttgtgctgacaccttgatcttgggctagccaccctccccttgctctgccatggagcttggtcaccttgtaccatggtcaaaataatggtgctctctttcaaaagccatccttagatttccagctaatagtgtgtagaaaagagaaaacataattttttagtaccccaaattctaggttatctactgcactgaatgatctaaaatatcaagtaggcgctttcagcaaagctgttagaaatataaatagaaaaaataggaaagattatttgtgggaccattcaaactaagactgttgttgttctcattattattgttgtttttaaaggacactgtccatatattgcaagacatgttgcccactgcccttcacctatgggattatataaacgcaatcctattttttaaatagttgtgcagaaaatcgagaagggagctaccttaactgtgtattcagttcttgagtgacaaagacaggcgtgagagagagagtcccttgcttccaaatcacccctcctttgcctcacccttttcaggacaaaccgactaccagaaatgaatctaacccatgtggtcactacaggatttatctgggcatttgctgaacctgctcgcaatttatttttatttcttccgatagacatggatttggcacaggggagtgaattctttttgaagcagcagatgtgcctggtacacccgtttgctgtaaccatttgtgctgtggttgaaaaaaatttttttaagagtgcagaattgttgaagggggagggttaaaaaaccagagccattttagtgattatgcaaagttagaatgtgagtaattttgctgcagttagtcattatgtgctttcatagcttgttttacagggataaagggatgtgtacaggtttggtgaatagagctcttatttgttcctaatagtcactcttcatgaaaacattttctacccttcctcctactctgtggcaaaagtgctctctccttggaaattatacctttctgggatccattccttttatccatctacaatcagtggacagacaactccattttgaagaacaaatacgttagaagaagaatttttttctcctatacaatctacagtgtaactgatacacattcaaatcatcgtaatacagtgatcattataaaatgagagtgttttctgcaaagaggaaaaaaaaaactgagcaaacatctagtgactttgttaggagcttaatgtgctctaaatatgatgtccttcaaatattttatttgaaatatttgataggtcttagaaaattttgctcatggaattctctgagaactgtaacacaccacctattcctttttcgctttgctttcggtcacccaaatttttttagaaatatgtgaacgagggtctgtttgtttccactgaagcaaatatagccacttgctcacactggtggcttcttttactgaagtccgtgaatatgttagaaactcttgtatgaaaatacagcaacccaatttgtccctattgagcctactttgtgatttccatgccctgctgcctggtgtgtatacactgagatccactttgttaaagaacaaaactgggtttgttacttttttgtaggcttattattaagtctgagcattctggtgtgaggttaggaacgctggtttcagactctggaaaacagagttctaatcctgaccctctgaagaccttctcactttgggcaaatctttcctgagccttgtttccttgaggaaaatgtagagatgtgtgatattcacatttcttacgccctacagttatgtgaggaatactgtatgtttcagttatgcacagataaattagttatttcttctcaaagaatcctctgttaaaaattattccccaaatagctctttttcgacacttgtctcaaggtggtcacattttaatttctgccactgatacacaaatttcagtgataagaaacccctgaatgacttgagagtttcctgagagatgggatcccacctattttattatcttttgtctttttatggcttccgagtagcagtaaaagataggaatggttggttctattacagtagttgattataaccaaaaactagtgaaccacactctccaaatgtcctgctacctacagctaagaaacccaatgtttataaactaactcagaacttttaaaattagattgaactacagaaccctctatcatacttaaatcttcttagatgaatggtgcacaaaactgatgggggatgggaagtgtgggcaattctgttaccgaactatttcccttattgtttcatttgattaaacacttctctcttgtatggaatttgccaataatacattattgaaaaaactgatttcaataatatgttattgaaaaaactaatttattgaataaaaacatatggaaaaatctctttgctagaccctaaggatggaaagcccaaatttctacccacatggagtttagagaggaaaggaacactaaataagtaattgcaaaacaagacgtaagggttatcataaggataatgcaaactattaaagagacattaatggtgggcaccttgtctaattttggaggttccagattggcttcctaaaggaggcatcatttcgtttgaaatctgaaggatgaataaccagttagaagttgcgagatggaagcaggttggaaagtgttcaaatcagggcaaccacaggatagctggagtgttgactcctgtgtagaggaaagtaagagaggaggctaagaagataaacagtagttctatcaggaaagaatttggacttcatggtaagagcaatgagaactcttgagagattttaatacaggaaggcaatgatcatatttgagttcttaaaatttgattttagaatagagtacgtactagaggacaataagcagtcagtttctttaaaaatacacatatacgtgtgtatgtgtttgttgcagtaagctaggtcactaatcatagtggactggactagggcaccaataagttaatagaagtagaaacattgacggtaactagtagagagaattaacaagctttactgcatcaagaggagaaaaaaaattgtgatcacgtttataacatataatcacattgctaaaatctttaaaatatctgttaaccttgaaacataactgatttatatagtttttgtcaatatacatatgaaccattatcttacttttcttttaaactggtatttcgaattaatgttttctggctttccagctgcataccattccattagctcaatgttctaggattttctcaaccatcctctgatttttcctttaatataaacaagtaaaatcacttatgtgcgttttaatagctcttcattgcaagtttgtccaccaaaagaatcatttcaattttcagtgctaccagtcatataaaaacgcacctgtaatattcccactgggattgagttttattatttcttgcctaattggttgaactcacagtatttttcactaaacccctggcctgattggagaaaagtgtctggtcccttgaggagatgcttcagcaaacgaggtcgcttgttatggaaataggctcttctctcactacatttctagatgatagaacacactcagattgatttcaccttcatcacaatggcattttatccagtgctggacacatgcatgctaagaactgagtgtactgtatgggtatttataatacccatattcattctaggaaataattatacatggctgggtatttacataaacaggagccttggagacctctcaagttcaaaaccgatggcattctatctcatttgaaagtcactggggtgggagaggacactccttaaaatattggatttcttagttttaatctgatgatatgctagctttatgaagatgtgagtgcaggccctcacctggatcgttgcttctctttttaataggaactagaaaatgaagattttcaaggtagcatctgggtgctcctaattgacttgattttatgtttgagaaaactaccttgacataccaacattggggtctctagaagtccagggagatgtttttcttcacagtgtcatataccctatcataagtgttgtgaggattaaatggaaaagcttctgggacaaaaactgctctgaagtgccacaccagactatactgttttaactatttctggctctgaagctattaagaataacccgtcactagcagagcacaaggctgtgaaatgaataagtgctgatacatttcaaagaagtaagatatttatgtgtgcatctctctggcaaaaactatcggggactcgttaggggtgtgtgtgtgtgtgtgtgtgtgtgtgtgtgtgtgtgtggtgtgtgctttatgtgttcattgaggactaaaaattagtattagtagtatattggcagcaatgttttgaactcggtggcaccaactaaaattgtgtgatttttatttcgtgcataatatttgagattattttaactcatcaccagatttcagctactatttatcctcatttataaggttactttttttctttaatgtggaaaataaacaaaaacataaaatggagaacaaaattttctcttaactgcctcacctagtgtaaaactgtaaccttttaaaatacattgaaaccatttttaattttctgctatgcttcttcctttttttgtatgtacatacacatggacattggaataccacaatattttagagtgtgtttgcttggtttttaaaataatgtatatatttctgatatatattatgttaaatatatatttatttttatacatttatatataagaaatgtataatatatactatgcctatataatatatatttcttcctttgagtgaaaaagtaatatgtggtagacacttagcaaaataggaaaagtatatagaatagccaaaaataacccctttaaaataaccaatgttatcagttgggaatagatccttctagccatatatgtatgcatatgtatatatgagatatagatagatgcattacttatcaacaggtataaaacaatattttctaactgaattttaaaacaaagaaaaattttgatacatattattatttttattatatagtggtaaaatatacataatacagaatttcacattctaaccaattttaagcgtataattcactggcactaagtacatttacattgttgtgcaaccatcaccagcagaactgtatctattcaaactgaaatgacatatccattaaacaataatgcactagctacattcttccttctcccatcccatggcaatcaccattctgctttctagctttataaatttgactcttctaggggcctcctatatgtagaaccatatggtatttgttttttgttttttgtttttgtaactggcttgtttcttcaagcttcaagcttaatctcttcaagcttcatctatgttgtagcatgtatcagaattttcttattacattgtgtgtgtgtatatatatgtatagatatatagatagatatagatgtgtgtgtgtatatatatatatcacattttatttatccattcatccatcagtggacacttgaattgcttcttcctttggctattgtgaataatactgctatgaacatattaccatgattgtacaaatagctgcattcctgcttttagttattttaggtatctacccagaagttgaattgccagattattgatatattttgaaatatttttatggcattgttttaatgactgtgtagtattctattatatgactatactgtaatgtatataaacaatcctcatgtattgattatttaaattttccattatcttttagttttataaagtacactattaacacggagcttcttgaaactaaacatttatgctctctggtcatttccataggctaaattttaagaaatgaaactatgggtttaaaaagtataaactttattagggcttttgttacatatcaccaaattacaccactgatttcccataaaaattttatagaaacaaacattaacttcgtccctaaatctaaattatataatcagttttccttctaagacaagtggagtcacaccattatgtcactcatagcccctaattccaagtgggatttcctgttcggctttagcaacagtatctaaaagtagttttgaactctggttttaactgacaatcacctgccccttcccttttgaatttccagatttcactctgttgagtgggtttatctacaataacttgcatttaaaaagccctaaatgattctgttgtgcagtcagatttaagaaatgcttttctaaatgtgtggtattatgtttatatatcgcactcttggccaggtgtggtggctcacgcctgtaatcccaacattttgggaggccaaggcagatggatcacttgaggtcaggagttccagaccagcctggacaacacagtgaaaaccccatctttactaaaaacacaaaatgagctggcgtggtggtgggtgcctataatcccagctatttgagaggctttgacacaagaattccttgaacacgcgaggcagaggttgcagtgagctgagatagtgccactgcactccagcctgggtgacagagcaagactctatctcaaatatatatatatatatatatacacacacatatacatatacacacacacacatatatatagcattcttaatctcatatatatataatatatatataatatatatatattatatatatatatgacattcttaatctgttaggttgttttccaactcatggggtcatctatcaagtggatagtgtaagtggcctggttggatgaggaatggagatatgggtacttaccctgaattatggaagataattagtgagatgactcaagaaagcaaatttagttattcttctagtcatggttaggataaaatgatgatgtaatttttgcatagagccaaaagaagcagcaaattagggatttcattataactgaaataggttagctgtgtttccatttttgctcattgtacaaactcagaaaccaattatatttatttatccagccattatttattaagtgcctacctgatatgaatccctaataatgagaccaagctcttcttgggcaataaaactctgaatattgcacatttactcttggaatcactggatttttgagagtcagagtatcttcttttataggtacctcgaccccagtgaagctctttttttttctcctgagtgatatagaaatatttttttatttgaagagaaagattatttattaaaaaaaaaaaaaggagaagagtaacttagcatttcccctcctttgttgttcagatgaagagtcagtctagagaagtcacgtgactttcccaatgtcactaaattctaaacagtggtaaagctggcactttttttctcggtctcccaagttccagtgcacaactcttcaattgcatgcttcctagtgatacttacatttgccagtatccataacttcaactgggaattgtaaagtgcacctcatgcactacaggtgacctgcagaaattgttttatttctcttccttgtgtttgaaataataataataataataataataataataataataataatgaacacagctttaaagtcagaagagtaatattggatttatattccacatgtcagcagtgagctggcatgggatagcagctgcctttttaacagagtaaactcttcagctttatagttcacatcactttgttgtttcctagacactggcattctcattttctgttcattctccaatttattcaatttttcttctaggagagagaaagattttccagtgtctacattttgatcacttatctcttaaaaataggaaaactacggatagactgataaagaattttgtggtttttttttttttaacatgtcaactattatatttcactgttttattacctgagagaggtggatggtttttaaaaccccaaactatgcagccagatgacccaggcttgaaccttcgatctgccacctactagtgatgtgtccttgggcagttacttaatctctcgtcaatatcttcttctggaaaatgaggattggtttccgtctcaggagtaactgtgaggattatatataaattatgttcaacacaaaatgtttgcaccaggtaatttctatataaatgtttgctattattacacatttttggggttaccaataggtattttagcttgtgttttctgccacagggatgtccagacaaagtagataactgaaagtgaaaagcacttgaggtattcttcaaataactcaaataattgtcatgaaaatataattgaaatggaaatattcatcatcttaatcttctagcaagtcaaccatcccccttttgatattttgtatattccttggccatatgaaaatatcattctctatggcctcaattgtattgtacaaatgaattcacatcatgtgtttttcatttaaaatttacatttaaatcttaagcagtttcccatgtcatgtagctgaaattaaaatgtaataaaatgattttgaatttcgtgctgctgtttaaacgttgaccttttgctactgtctattttctccttctgttacattggaaaattttctaagtagaaatcacttttactcatcacactaaattttgccccaaatattctgtaactaagaactttctgagtgcaatgagtgtgactttctttgtctcatagtgaatctagtaagcagctcaatgcctgttacatagtagactttcaataaatttctattgaataaataatttggattgaatttctgggatttgtggtattgtgtttacttggcagtaaattcagaatgtactttgttttagtacatgttgttaaatactatttttaaatgcattcgtctctttcctttcttagtaagtttatttaaaaattgccctttatttccagaggggatttgagtcagcatcaagtaaaacttacacatatagtatggccataaaaatgaaaacaagtacctcaaagtcttcctggaaaaataatagtatcaatacattccaaattaaaatcattaaactatttagaggtggaggggcactaatgagatgactgtaattaggcacacattacatattttacagaatttcttgattgtcaagtcaataaggaaaataagatagttcatattttttcatggtcagttataatctgaccaaagaaatgcatttttcttgggatattaaccttcattcattcatcaaatatttgttaaatgccagcttatgggctatgatatgatgaagcataatgaggaagcagcagggaataaaaaggacagtctctactagtatagaagcagacatatgcacatgtgatatgtacagggagggagaagtaaagagcacccactgtgctggaggattcaggcaaagtttcacggaggaacctgacattcagcttgagatgtaagacattcctaggaatcagctagataattcaaagacaatggagaagtgcattggtgtaggtatcattgttgagatgtgagagagcttggcacaatagacatgaaagaaggtcaatgtatctcaaagagaggtagaagaggtggatttgcatccatcattcccctaacctgttgaagatttttgagcaggaaagcaatatgattagatttgcatttgcaataaatcactctggctaccaaatgaaggactcattgaaaaacagtcgtggacattgggagaccagtttggatgtttttagagaattcataatgaaaaatggtggaatcttggcatgggattgtagtagtggaaatggtaaaatgtggacatatttgtgagttatggaattccctatttagagagtaggagcaacaggatttagttcttgaatggaaagtaggcagtctcagaaatgattcccagtgttctcctttgagcaacaactgggtggatgagaaaaccaaatgaaaagcagatcagggtggatgatgaaatctgtttttaatatattgagtctgaaaagcatatgagacattcaagcagacacatgaaatagacagttgaggatttgggcttagtattcagaatacagatgaattctggagacagaaattctaaagtcttcataacatagaaggtatatcaagttgtggccatggtcctggagacaatcgagagacaaaagcagagatctggtgtcaaataaagggaatcattattcagcggctattgagcaatatattgggtattgtcattagtaacaatttcacagaaagatttaagaagcattttatttttcgtaagataatattccatttgatgcagatagatagctttctggtaaactaggttgatccagagataaagattaaaaaattcccagggacatttggttaacattttacttccaatggttctcaactagagaggaaaccacctcctgatggggagtttggaaatgaatgggcacatttttataaactgtcacaatgactggaggacactgttatcatttatcgggtagggagcaaaatacattactgtcaaactcaagaagaccatagtactctgttgagagacactgataaactcttgtgccacatatgtttctctggcttgctgattgtgaagttccgagctgactgtcaagaacggtcacagaccttctctagattttcacctccacagtactctctttgtcctgaacctagaggagatgacggctctgcctctgctagttccatattatttccctgtccttcgtgactcctctgcaattacatggggccatgtacataatacctgtgtaaatcagatccttgagaagacctagttggtgtgtgctgtcatttttatttgaatcctgactcttatggctatcttttccacatatcatttgtctcaaatatagtttcctagggatctcatagttccagatttagcttcctgttaagttacaagaagctcttggatagagtggtatctttttgtttggttggtttttgtgttttgttttgttctgtttttttggatattcgtctttaaaagggtaaacttgtcatttacttttgtaatttaagcagcctggatattcttgtcttgttggtggaggggctttacctttctgcttgaaggtggtcccaatagtactaaatagaaacatagtttcctcattaagcaatttattaaaatatgtatgttcaagacattcctaaaaaatactcagttaagactccaacattctattacagaggacgtggaaaaggcattttgaacctagaaaaaatttaaggtcagatttttctcgtcaataatgccagtcataaaaaagtcagcgtagatgggcattgaatgaaagagggaataaagctttgcttttctttgatgactcaagatcagcagaaacccagagttcctattttgaacactttacaaacccaactataaatggagacagtgactgagcaactgggctgatgacaggcatgctctctgctgcagctgtaaagtctgccccaagaaagcagttcaaaatttgcatagtttgaaattgaaaaccaataacattcattaacaaaaaagaatatagacctaactccttaaaagtaactttttttttataagtttcttctttcagtctctttcttggtgaagacacacacacacacacacacacacacacacacacacacacacacacacactatttaaacatcctgaagtctttgaattaaagcaacagggcacaatttcaggagccattgctttcttctaggaaatacctcactattagagctctctttggagatgagaagatttttctcaactttattatgaattccattgtgtatgtgtgagcacgtttctgaatattttacatattataactgtatgtttgaaaatagaagatatatatatatatatatatatatatatatatatatatatatatataatttttttttcctttgcagttttacgtgccttacatcacgggagctggaaggggtagagaataggaataattttaaagcatatttatttatgttcttcatggttaaagaaaactatgccaacattcttctggcccacatattcaattaaatacatagtgaatcttttctacttactggattatttggtgcttccaagcatttatttttggcatttcatttcgtttttgtttttgcaggaatttttgaagttttattatgatttaacatttttattttgaaaatcgagcacattttaaaaattactctgctgtagctgtagtctgcccccaaaaacagatacttcaaaattcacctattttgaaaataaaaatgcaggtatagaaatttacatatacagattacttatttatctatgatttgttatgtgtatataaatctatttatacaatcatctataaatacagatatgcaaatatgttattttttgagacttaaatgtctgtagcaatcctttttttatgtggtatttttccattagtcattttctaagcctcttcaacatgtaaagctctgtgaggttaatggggggagagtggtgtcctaggatgatgaatagtgtgtctctccctgtcccccagtctggtagagaagctgtgcacaatagattagaccaaatagatttctacattttcaatcagaattagctgtggccaggagataagaacagacaaggtgcacccctgtgtgtctgccttctctcttggagcaggccctccacttccccttttgtttaagttcagataacatgttacattgtttatgtcactattcttcatgaccaattgtcacaaaacttttcctctatgttacttcttttagaagttttagtttcaggcctttctcatctttaaatcattaacccagttttagttaatgatgtcagataagggtccaatatcattcttttgtatgtgtatttctagtttccctaacatcatctattgaagaaattttctttacctatcatctattctttgccccctcatcaaaaatcaattgactgtatacacgtggatatatttccgggctctctgttctgttggtctgtatatcttgtttttcatgccagtaccatactgttttgattactgtagctttgtaatatattttgaaattaggaattgtaatgcctccggctttgttcttggcttcaagattgataaggctttttgtggtcttttgtggttccatgtgagttttagaattgttttttctatgtatgtaaaacttcattttggtatttagatagggatctcactgcatctatagataactttgggtaggatatacattctaacaatatcaagtctttcaacctatgaacacagatgtttatccgtttgtttgtgtcttgtataatttctttcaccgatgtttaatagttttcagtatataatctttctcctccttagataacttttttccaagttttttatgctactgtaagtagaattttttcctttctttccttttctgctattcgtcggcagtgcacagatatacaactgatttttgtgttcatctgtgaacactttgaaggcaagattatgccttatttgtgttctacatagtaataaataataattagcagttattaatatttttcatttattcatttttattgagtttcgttggcagtaatttttgctttctttctttcttttttttcctattctttttagagctccactggttcaacagcctctcctccagtttcgaccccagtcacaggacacaagagaatggtcatcccgaaccaaccccctctaacagcaaccaagaagtctacattgaaaccacagcctgcaccccaggctggacccatccctgtggctccaatcggaacactcaaaccccagcctcagccagtcccagcctcctacaccacggcctccacttcttcaaggcctacctttaatgtgcaggtgaagtcagcccagcccagccctcattatatggctgccccttcatcaggacaaatttatggctcagggccccagggctataacactcagccagttcctgtctctgggcagtgtccacctccttcaacacggggaggcatggattatgcctacattccaccaccaggacttcagccggagcctgggtatgggtatgcccccaaccagggacgctattatgaaggctactatgcagcagggccaggctatgggggcagaaatgactctgaccctacctatggtcaacaaggtcacccaaatacctggaaacgggaaccagggtacactcctcctggagcagggaaccagaaccctcctgggatgtatccagtcactggtcccaagaagacctatatcacagatcctgtttcagccccctgtgcgccaccattgcagccaaaggtaagaaactcagtaacataaggaggagaatacaggggtgcctatcttagtctgccttccccaggaagcgaagcctaaggcaaaagtgtgtgtgttacttttatttcactgacaaatacaatcccagggaaggatgagtgaagccagagaggagagagagactacttagtatgttactaatatggccactgtttagtatcaaatggaattgcttgctcaatctcagagaatcatcttccaaagcccacagacaccatagcatctgaggacaaagtgttctgatggagaaagagaaaataatttatttttcacatccttccctatattggttaaagcttccctctgttgtgcagaaacttcctctacaccttgcatttgcttggacattaaacaggtctgtagtatctcaagcctcagcaagggtagtgatctatgggtgagacatgtggagggcaaaactgagtgaactgctgtcaggctgtggccctgtgaaggcgattataactcccgcaatgttggtaccacagcggttgctgggccagaacaagtggccaaggacccaggaaatgggtgaggccaagcaggtctaagataatgcaaatgccttggacagtttctcctttgagaaggggctgcagtataatgcagcttgtttgtgaccccttgtttattcattttactaatcctccagaaagaatcttattcttcagcctttagcactattaagcaatgtttaaaaactccttatgagtgacagttacttcttatttgatttaattgtccatatgtggaccttttaagttaacactctctgttacttcgtctgaataggtaaggtgtaatactacacatgcccactcaccacaacttggatttttcattagtactggaaccaacacgatgttgattcctcccattatgactagaggaaccaataagaataacttggaatcggtgaaaatagaggaactgagccagtttccagccacttgggttggaagagtgcccttgcttcttttcagttagaactgtgagaaatcagaaatttgagagccctcaattagctagaagttcaatggtagttttgggggatggattgggtagaagtttggactgtatttttaaaaattctttccacatttttacaagattgtccatttcaagacagatctattcacatattcaacattgtatcaaaaatttccttatagggtatttactaaactgtttttcttatatgaaagcgtctgccatattaatggtgtcctatgtgaatttcacattctataggggaatagagctcttcctgacagtggggactgtgaagagctggagaaatcctatagccttatgtgtgaccactatatgaaattggccagccatgatccctttccgatagatagattccaaattagaattttaaatgattttaaacatgactcagtttcttaagtctctctatgaaaagaaatgttattacagttttttatttctttttaaaatgaatttgtccataatagccaatctggacagccttgctctttgttaatgtcgcagtatatttgcaccagtgcctcctggcccagtcaaggggagtctattttcaaaacaaccagttcagagaaacagattattcaacttaaccacagtttttgttttcaacaattgcaacagatttacccagggaagattacagtaaaataaaattttaggtcagaacaactgctgtcaaggtttaagttcaactagacagacaatttagccctgcccaaaacagggtgactgaaaggatggctgagtgatgttcctgaaggaatgacatggtgtctgccttgttggaggattgtgttatcccacataggaaccagacatgagagaaagcaaaactatgtgtcttgatgagactcacctggtgagaggtactgagctagtcttcagatgttgttttctcactaagtcactgggcactctggccagcctctcttcagcatttggaacccatccattggtgtaggaaaaagaatcagcccccactgctagaactggatctaaagtgctgggtccagccacatccctaacatttggcctgtcctcaccaactgacacagggagatggaatgaatttttataaaccactcatcagaaaacatggaactttattttacttcttatttgagcaaggtggttattcaagatgatctattagatgattacagattttggatatcagtagatttcatgttatttttaaaatttttgatatatttgtttttcaacagtttcatgtgttttcacatcatattcggctgtgcattgaaaaaatgaaaatcaaaccatgtacttttcactctgattattaagagtggttagaggttgatatttagccatctgtcctgtctgtgctttgggaaagggggaagaggctgatgaagttatggataaattctgggcgcgttgtgagggcattggctgatgaaagggtgggttccttcacagttggcctttgagcaaaacactactgtattctactgcacctgtgcacagaggaccttattgtccttatattgactgtttggcttaattatgtgactacgggcatgagaaatgagctccgaattcttatcccagttctttccttgacattcctcttccagtttgaggaaaacctctagacctctttatgtcatgcttcaaacctcagtaaagtagaacaccatctttactaattaattaatgattgcaaaaggcttggaaatttccaaaggctgaataattgccaagtgaagactattcagctttccactcgctttcatttatttttaattttttttagtcactgatggaaaacttaccctcatgtctgaaaacaattatactttattacattgagtgcttctggggagtttggcatttaacccattaaggaaaaagtttaaaagatgaaataaataaatctcccttatatttgagatgagctgctttagttttcctatatcaggatagtataaaaagaggaatatgatatagtaaaaaagaggagagacaggatggggaaaaggagaaaggaaagaaaaaatgaaaaggaaaaaatgaagaaaggaaagaggcagaatgagaacctgcaaggcttaggggatcatgattatgtttatgttcccataatgtgctaagcagtgaatttgcatgctacagtgggccatactgtatttcctataccatctgagcagagttccttgaaaaatagtgttataaataagtctttataaggtagaaatgttctcttctcactggaaatcctcttaaagatgcagtggaatctcttctctttgctgatttataaaagctaatgtcagctacatcttgccatgtagttcacagaactcgtgtcctgtgcattttatatatctatatctatacctatatctatatctatatctatatctatatctatatctatatctatatctatatatatcgctgtgagttgggagccacgttttctccagtatttagataaggtggctcagcttgaaagttccagtgctaggacctggaagctagtcacaactctcaagtctaaagtgaccaggcaactttagcctccaattatcataaaaactcatctccgtcagcctcagctattaaagggacaggtatttgctacataatgtgtagaagtgctggggctgtgcattccagggaagttggagaatcttgtcccaattagtgtagaggttatgttaaattctgaaaccatctactattaaaattttcttggaaaatatttcaggaagatgagaccttggaggtcaactaaccatctttcagtaaatctaaaagtttttcttttccagaattagaacagattgttgcttttcatttggatttcgagtttggggcatattttatgggtcagagaagagtgtagaggtaatgaactgttgtggtcagtgttgaaggactttaagatctgtaatttctgttaagattaaggaaacagagaatgttcatacactaccactttgaacattccagtagtatgagaatatttaaattaattttatttatttatttatttatttatttatttatttattttttgagagggagtcccattctgtcacccaggctggggtgcaatgacgtgatctcggctcactgcaacctccacctcccgggttcaagtgattctcctgcctcagcctaccaagtagctgggattacaggctcccgccaccacgcctggctaactttttatatttttagtagagacagggtttcaccatgttggccaggctggtctcaaactcctgacctcacgtaatctacccatctcgacctcccaaagtgctgggattacaggtgtgatcccaccatgcccagcctgttttaatttttgaaaagagaaagttatatacattgattgcactctaaagaattgttggcatttggagagagttatccgtatggtaatccctgtgttaattatgtctcaattctaggatcagagaaacaaaatggaagagatgattagggtgggcagaggaatgaatgcagatagatccctcaagtcagtagctaacactagaatacatgtgaagatgagaatggtagatattgcttgaggccagtgactgtaatattagtaattcctctttgtacagactttttagtttccaaagcactttgtggagctcacaaaatccatgatcattaagcccaagtagaggtctttgtctttctttttctgatgagggttcaaaagcccagtgatgagagccactcacttaacgtcatatgtcaaattcatcggacagccacagctccaagtcaggtcttctaaagattgttcccatgctttgaccgtggcaagtgactgaatgttggcatgctttggatggcaggagctcctcatcagcgccagtgtacatggctccactgtgacccatgttacctgcagagattaaagtgggcttaggcagtcaccatggcctttggataaaatcagcggttggaggggaagcacccattaaatccctgcctggcacccaggcctggtgccttagagctatacttccccatccccatcagtcacataaaatttgtcccgaggttctttctaccttcactaagtacttaatatggagttcagtcatccccatttctcacttgaaccattgaaatggcctcttacttagggtttcctctggcagtcatctctgtacccatacatcctacatgtaataccagattaatctttctatggtaccttatcattaattgccttttgcaaaaaccttaataagttcccaaccagttgcagaatacattgaaatcccaaactggatttctagttttatctctccccagtatcctggattccagctgatatgttacatttttagttaattctcacctctatggctttgctcaccaagttccttcttcccagtccttccccaaataaaatctacacatctaaaagtgacccattaagatccagctacagtgttaatttctcccataaggttttctcctcttcctaaaagctagttgtgtgttatttcaccctctcttttagatgttttcactcttttactgtactggagtcatttgtgttcctgtcttctatcaacctatatccaagcatatattagactaagttttaggagaatatcctatgtttctagaaacatatgtatgtagtaactatatgcttagttatttagcagaggtttattgaacattgtgttcactttgaagaattttggtagacactctgtagggccctattagtgtttaagacattgtacagctcaggtgcattttcctttaaggatgcatttaacctgctagatgtcatctcatttttaagaccagagaaaaagagagcagcatctgttgtttcttgactttttaataatagccattctgactggtgtgagagatggtatctcattgttgttttgatttgcattcctctaatgatcagtgatgttgaactttttttcatatgtttgttgaccgcataaatgtcttattttgggaggtggctgctcataccctttgtccactttttgatgaggttgtttgtttttctcttgtaaatttgtttaagttccttgtatattctcgatattagacctgtgtcagatgggtagattgcaaaaattttctcccattctgtaggttgcctattcactctgatgatagtttcttttgcaaaagctctttagtttagttacatcccatttgtcaattttggcttttgttgcaattgcttttggcgttttcatcatgaagccgttgcccatgcctgtgtcctgaatggtactgcctaggttttctcctagggtttttatgcttgcttttgggttttacatttaagtatttaatccatcttgagttaatttttgtataaggtgtaaggaagtagtccagttttagttttctgcatacagctagccagtttttctagcaccatttattgagtaggaaatcctttccccattgcttgtttttgtcaggtttgtcgaagatcagatggttgtagatgtgtggtgtaatttctgaggtctctgttctgtttcattggtctatatgtctgtttcaataccagtaccatgttgttttggttactgtagccttgtagtatagtttgaagtcaggtagcatgatgcctccagctttgttctttttgcttgggattgccttgtctgtacaggctctttttcatttctatgggttttttttcatttccgtatacgttttagcatcagtttgttgttgtccacaaaataggctgctatgatttggagattaccttgaatctttagatcaatttgaaaagagccgatacgttaacaatactgggtttttcaatccatgaagatggcctatctcttaatttatgtatgtcttctctaatttctctcatctacatatcatagttttgcatatattttggtaaacttgtccttaagcacttcaaatattggatgctattgtaaatggtattttaaaatttgtttataatcatttgttattagcatatagaaatagcaatagatttttatatactccctttgtatcctataacttgttaaatgtaatagttgtactagcttctttaataagacttcttaggcaattctacctgatcattttatctgaaaattgttgatgcaattgtttatttcctttatggataagcctattcatcaacattttatgtttgaaagatttgcttgctgattgaaaaagaaacagcgtgatacaactttaaaggaaataagttggaaaaaataagaacctttcctctccacttccataggctagcctacgtaaaccatcagacatagaagcgattttcagaatcataagtcttaaccccttacatttacagatgagaaaactgaggcctgaagagttacagtgactttcagagttatgtggttagtaaatgacctcatgtgaatgcaaaatgtaactcttctattctgcagttcttctctatattggttaaggatagttcaagacagaggaggtcagaagtaagtgacctttaaaaggtgtaataataactattgtcaggatgatcttatttcctatctttagaaccccatcatcagttttgtaaggccactgaataatagaaaatggttccgattctggtgctccctattctgtctcacagctgctcctgtgaaaacactcgttcatgggctctgtgtaattttgactcagtccataatctctctatcctgattttaaaagttatcatcagaatggatgtgctggtatactaagaaatgtctgtgaatattatttatttattttacttatctaatcattttcatagatttggttgtttaaaaataccccaggtctcaaatccctttggaaagttcagcaaatcattttaacaggtaattctggcaatatgtaattctttgtgtttacagagtgagagaaattctatttatcagtgttttttctttgttttgttttacttcagttctaagcaaagcagttattttgcttattgacatattgatatattcctttgggaatctcatttctttcttggccagctacaaacactcatactgtccaatttcaacaagagactatggttattctcttcttcaccaaacaaagaaatttgaaccattattgataaataatttctggtgaatattaaagctttgaaatgttttgcacacacagtgttaggaagtgtcttagagtgaaagacactatttttactactatagtatcaaaagtgccattgtcccacatacaaagatttacttgttaccttagttctttgatttttctggagtacagcaaccccaacttttagaagtactcttaacaaatgatacagtgtttgatctgtttcatctttggacttcagagaatgatcttcaaataatacagtttggtttatttcagaaggttgcttccttaaaacaaaattttgaaaatatgagataataacatttaacttctttttcaatcacttataaaatttacgaaacactctcatataagaaaaactctgtaagttgttcagaggcaacttctttagtatcctaccaatactgaatacctaagggagggtaagaactgacgtcgcctcactgccagcccagtgttctttccactctgtgaaacttgcctccatttgtagctgtctgtgtttgtatatattagctctattttgtgtagagttgtccaaacataaaatattcctttggcgcagagtttagagactaaaacttctgagtagtatttccgggacataacatatatttaacattatttgaaacccaagattcagtcaacattgctattaagagttaaggagctgaaactgtgcataccctaagtctgaattcaaggtaagaggtcccttgttattcagtctttataagtgtttggtatatttatgcctcctcaaatatgacaccatctttttttaaattcacatttaaagatgattgtaaaacaagaaggataaggtgtaagtgtggtagttgttttatttatggatttatcagttagctgttacttattttttgtggttcataatgcaattttaacataagtctgaataagtttactatagatgatattagtaggttttaccagaggaaaccatgcttttttattttatttttttctttttctttgagacagagtgtcactcttgtcgcccaggctggagtgcagtggtgcaatctgggctcactgcaacctctgcctcccgggttcaagtgattctcctgcctcagcctcccaagtagctgggattacaggcatctgccaccaggcccagctaatttttgtatttttggtagagacggggttttaccatgttggctaggttggtctcaaactcctgacctcaggtgatccactcaccttggcctcccaaagtgttgggattacaggtgtgagccaccacgcctggacagaaaccatgctttataatcctgctacccaccccatccaaagcacacaaaatattagttaagtaagctactagaagacaactgaggctggtggtctctgcaggggcagaaaaatgggaactggagaggagttcaggaaggcagcccagagaatatgaagcaggacccagcacacaacagcctgtgggccacatgtcacttgccacctgattttgtaaataatgtttgcttgaaatacagccatactcgcttcattccatattatcaatggctgctctcacactataacagcagagctgagaagatgcaacagagaccgtatggcctacagatattaaaacattttctgtatatcattttacagaaaaacattgttgactgctggtcaaaaatatgggaagaacgtcatgaaatttagattcttattaaaagttcttgaacatccctgaactatttaatattatttcttgtccagcagatcctgaatcttaaattagaagttgtgacagtaagtggaaattttcagggaaggaagaacagaatatcaaaatcaaaaattaacatgctatgtgcagagtaggttctatatccctcctttttttcccaccctggtaaactcttatttaaacttcaagatctgtctctaatattaacttcttggagaagtttgaccattcttccagttcccacatattattagcttatctttcctctgattttttctcatagcattttttcattcatttactaaaatatgcactaaaatatgcacctcattcagtatttttatataataacattttaagataatttgcatacagtataattcgcccatttaaattaaatggcgattaaattaatttaatttaacacaattaaattatttttagtatattcacagtatattttactgtattcttaaatatagtatatgtgcaatcattatcacaatcaatttctttacaccaggaagaaatcctctaccaatgagcagtgacttttctttttccccaaaccctctaagtctaggtaaccatgaatttaatatctgtatctacagatttaacaattttggacatttggaataatactatatatagtcttttgttactggattcttagtataatattttcaatttccattcatgttgtagcatatgtgattgctgtattcctttttattgctgaataatattccattgtatgaatacatcacattatatttatattttcatcaattgatgaacatttgaggtttttctatcttttggctattataaataatgcttctatcaatatttgagtagacatatgttttcagttttcttgggtatacacctaaaagtgggattgctgagtcacatggtaatttaatgttcaacattttgaggaactgctgaaatgctttccaatggggctaccccattttccattcccaccagcagggtatgaggatctcattttctctgcaacctcccaccgcatttgattttattcatattatgtgtctatctctcaaatacaaatccatgttcttcaagagtggaaaccatgtctgtttcagttttgtttctgtatgcctaatatagtacattgcatgtatcaggcactcatgaataaatgaaagagtcaaccaacaagtgaaataacacctactgaattgacatggaaccacatagagttcctattatcaagagttgttgggttgatgggtgcagaaaaccaccatggcatgtgtatacctgtgttaagaaacctgcacattctgcacgtgtaccccagaacttaaattttttgaaaaaagcaattttattccaaaaaaaaaaagagtcgtttatgtgggcttaaatagctgtgcttttataaatgttcttttttttaatttcagcttttattttagatacaggggatacgtgtgtgggattactacatgggtaattggacccaggtggtaagcatagtatccaataggtaatttttcagactgtgccctctcccttcctccccgtctggtagtctgtggtgtctgttattctcaagtttatgtccatgtgtgctcagtgtttagctcccactcataagtgagaatatgtggtatttggctttctgtccctgcatcaatttgcttaggattatggcctctagctccatctatgttgctgcaaaggacatgatttcatgattttttttgactgcacagtatttcatagtttatatgtaccacatttttttaaatctagtctaccatttccagctatgttcttcatctttctaccattcacatcctagtgcgtgtaaccgataaattagtattcatttagatggactccattttattttattttattttattttgagatggggtctcattctgtcgcccaggctggattgcagtggtgcagtcttggcttactataacctccgcctctgggttcaagtgattctcctgcctcagcctcctgagtagctgggattacaggcatgcaccaccacgcccagctactttttgtatgtttagtagagatggggtttcgcattgttagccaggctggtctcaaactcctgacctcaggtgatccacccactctggccacccgaagtgctgggattacaggctgggattacaccactattttttaatggcattttagcagttaaaaactgaatgctctaaaagtcagggatggcatgggcacaggtgaaagatgaaagttttgtctatttctatttctatgatgaaatcagttgggttaacaagagcattcttctaagcagctagagattctgttggtctcatccagccatcacccagatggcaatacaaccagtaaaaggcagataatggtatctgtttttgcagactttatgttcacaccagtgtcactcatcttaacctggactcttgtcatcagcttgatatttcctcactttcctctttctccccttttcaagttatagctgtgccttgacatgacttacccaatactctgtattctcttcgtgttcattaataggctcattttccagaactaacattggggcatttcaaggactttttacgtagcacatgagctgcttacaacgtaattctgtctagttgggacatatgtcatttagccagattgtttatggcattaccacagccaagcatatattagtttcatagtaatttctagggaaaaaaatgtggaggaaatatgtggtttttgttatacttgcaatgttactatattactgcttttttttaagttttgatttcaataaatacctagcatatattttcagatgccaaaggacatacaatgatgaacaaaaactcagctcgtcctcaaaatcgatatgtattattggtgatgctggactccacccactcatagatgtttctcattattgtgaaacattactttttggaaaaagagagctgggccaggcacagtggctcacacctgtaatcccagcactttgggagaccgaggcaggcagatcatgaggtcaggagttcgataccagcctgaccaacatggtgaaaccctgtctctactaaaaatacaaaaattagccaggcgtggtggcgcatgcctgtaattccagctactcaggaggctgaggcaggggaatcgctcgaacctgagaggtggaggctgcagtaagcccagatcacaccactgcactccagcctgggtgacagagagagactccatcttaaaaaaaaaaaaaaaaaaaagagagagctaacatcttcactttttaaggaaatagacattgcccccatgattgtatggatgactagatcatttaaaacaaaaattacataagggcttaaagagtggctcttaagtgtaaatgctaggaagcacccaattagttattatttcctgtatgtgttgccttcatggacattggttcatatagcctcaaaaagtctatgaagatactttttttttttttttttgaaagagagcgtcactctatctcccaggctagggtgcagtggcacaatctcagctcacttcaacctccgcctcccaggttcaggtgattctcccgcctcagcctccagagtaggtgggattacaagcatgcgccaccataatcagctaatttttgtatttttaatagagacagggtttcactatgttggccaggcaggtctcgaactcctaacctcaagtggcccacccgccttggccccccaaagtcctgggattacaggcatgagccaccgtgcccggctgaagatactataaacatcttgattttttactgagtcagaaactgagaaagggaaaaaattatttgctgaagactgcatgcctcaagtttatacccattatactacactgcctgcttgcgaaagtatgttttaaaaaattgtcactgctgtgcagcaactcaaattgtcactgctgtgcagcaactcaactttaagtcttaaacctagttatcttttatcttgagcaggacatatatgttaagctgctgaggatgctccttaacatgaggccattgggcgggtgtgtgccagacaatcctcctagttgtttctctaatacagagcttcaggtcgtctcttcctttttcatcttctagcctgccctggccaagtacctatgaatcaaccggcaaggcgaggggtgtatttggtgggctatagagtggaattaagcagaatatcaaaaattttagccaataacattgaacctcaaagaggaaagtactgctgagttctgatagatgcaagacaagctaaagacctccttagctccattgttctgcatcagcacaatatgtcctagtgagaaggaaagacatagcaaaactaaaaatgacctgtttttcaagagcaatgtcttttcacccaaacttgtgaactgcttgccaaaagtcaggactaacattgttttgtacatttgcattaaaagaaattatatcaccgttgaagagctgatcagagaaagggtataggaaaaaggaaatgttaaaataagctgtaaaatccagcccatttatatctggagtttagaggcagtctaacaaaatgaatgttccatttactaatcacatttgccatttattcaaaacaaacacggcttgagagaggattaaataaacatccaaaaactgtcgttcttgaaacctttggatagaacattgagttgcattcctgcaggagaaatgccaagtgagtgagcctagtccaagtttgtttagaaagccatatttgggagaaccatggaagtgcgaacctgatcatgtgaaaagcccaggactgttcagccttctgtggcagttctgtgagttctagtaccagactattaatagggagtcaagtagaaatatccttccttcccctccctccctccttcccttcccttccttccttttccctttccctttccctttccctttccctttcccttcccttcccttctccttctccttctccttccttccttttccttccttccttccttccttccttccttctctctctttctctcttctttggtgtgctgagaataatctgcagacagtgactctacagataagattgcaaatattttcccttccttcattccttccttctttcctcccttccttccttctttccttcttccttttttttcttttttaaccacatgatttctatttcctttagcaagatgttatcatgtgagggaagtcttaggtttctatatccctttattcttagtgttagcatttcttattaaagacagatgtctagttttctattttaagggttatctaatttcagtcataaaaatgtcctataaattaagacataactttgtcaatactcttctagaacataatagctaccccaaaatatttgttcaatgatgggaaattcattgatatttagaccttcagagatgaaataaatatgttgcctttgcttttcaaagatgccatcttgcccattcataagaaaactaagacccacagaatgactacccaaggcctcacagtataattaggactttaacaaaaatccataaaacctctggtattgggatatttaagataatacattgatatatactttatcactgtctttgataaaataacagtaaaaccattttaatgggacacatttttataaccattgtgaatttggtcctcaaaaaagaactcactgagatgatgagataatgcatattcatcctcttttacagatgatgaaacatttcggagaaggcaagtcagttttccaatttttcatactatatagatcattgaatctttgtcccttatatacagaatcaacaatatgaaatatgtggaacttgaaatcatagtttccaacttttctgcctatagaatgcccatttccagttgcttaacatttagattgataaacatgaaattcattaaacaggaaactgaataagagacctggactaatatttaggtattacttagtattccatccaagaagtgtctgcagacagtgactccatagatgataaggttgcacatatttcagaagccaaataaatgttgtgattaaatgattcaagtctgttaaccatttggtagttatgatgtaaatggctgttaaatggaaagcatttgtaaaaatgtatgtgcaaaaataaaggatttctaacaaaccgaatgggccttacctattttagttaatactctcaataatgagcagtgagattaatttataagtatgtgtgtgtgtgtgttaagatatattcacattttatgaaacctgaagctttgaagcttatcactgtggaaataacttctgtatgcataaaagtattatattatttcggtaggactgctataacaaaatacagtcaggccttcatattcaagtaggctgcattcagaattcaaccaactgccaatggaaagtgtttgtaaaaaataacaagtaacaataaaatattagaaaatactacaaatttcaaaatacaatataacaagtatttacctagcatttacattgtattgggtattttaactaatctagagatgatttaaactatgtaagaggatatgtgtaggttacgtgtatagcatatcatatatataagggatttgagcatccatagagtttggcatctgcatggagtcctagaactgatcccctgcagatatgaagggacaactgtaccacaaactgagtgacataaactacagatttttttttcctcacaattctagaggctagaagtctgagatcaaggtactcacaaggttgctttcctctaagagctttctccttggataaaaatggccaccttctctctgtgtcctcacatggtctttcctctgcttctctgtgtcctagtccctctttttataaggacaactccagtcgtattggattaaggtccaccctagtgctctcattttaacttaatggcctctttaaaggccctttctccaaatacagtcacaatctgatatactaggggttaggacttcaacatattaatttgaagggagacatgactcagctcataacaattatgtaggcaaatgaacatttattttaaatgacagaggaaatgcaacatgttataaattaataaaagctatgaaatacctcaaaaatcacattaataaaagctatgaaatacctcaaaaatcacaaaaatcttgaaaaataacactcttatgaattaaattcctgattactttttcttacatttttagcagcatattcattgattaactaactgtacaacctaatttcataatattttctgcagagagaatacaaagataatttcatgctgagagtttattactaccagtcctgccttacaacaggtccttaagggaatgataagcatgaaagactgttacctacttctacaaggacacctttaagtacatagcctgctaacactataaagcaactatactatcaagtctacataagaaccaggtaacaacatgatggcaagatcaaatgcttatatatcagtattaatcttgaatttatgtgggctaaatgccccacttaaaggacaccgagtgtcaaattggatgaaggagcaaggcccaactctatgctgttttccagagtcccatctcacatgcagtgacacctttaggctcagaataaagggatggagaaagctctatcaagcaaatggaaaacaaaataaagcagaggttgctattctatttcagaaaaaacagactgtaaaccaacaatgattcaaaaggacaaaaaaagggcattacataatgataaagggttcaattcaacaagaagacttaacagttctaagtatgtatgcacccaataagggagcacccagatttataaaacaggttattagagaactacaatagtgggagacttgaacactccactgacatttctagagagatcactaaagcagaaaaccaacaaagatatttgggacccaacacttgaccaaatggacctatgagacatctacagaatatttcacccaacaacaacagaataaacattcttctcatctgcacatgacacatactctaagattgactacacacccattcataaagcaattctcaaagaattcaaaataactgacatcataccaaccacattctcagaccacagtgcaataaaaatataaatcaatactaagatctctcaaaaccatgcaattacatggaaattaaacaacttgttcctgaatgacttttgagtaaagaatgaaattaaggcagaaataaaaaaaatcctttgaaactaatgaaaacagatacaacataccagagaacacagctaaagcagtattaagaaaaatgtttgtagagacaaacacctacatctgtaagttagaaaaatctcaacaacctaacatcacacctagaggaactagaaaaacaagaccaaactaattccaaagttgatagaagaaaataaatagttaaaatcagagctgaactgaacaaaattctgatatgaaaaccatacaaaagatcactaaaaccaaaagctgtttttttttgcaagaataaataagattgtcagactactagctagattaataaagaacaaacaaagagaaccaaataaacacactctgaaatgacaaagggtacattaccaccaaccccacagcaatacaaaaaaccctcagcgactcttatgaacagcactgcagacatacattagaaaacctagaagaaatgaataaattcctggaaacataaaacctcacaagattgaagcaggaagacattaaaatcctgaatagaccaataatgagttccaaaattgaatcagttataaaaaacctaccaaccagtaaaagttctggatagaccagatggattcccagctgaattctaccagatgtaataagacttgctggtaccaatcgtactaaatagcttccaaaaatcgaggaggagggactcctccctcaatcattctataacgccagcatcattctgataccaaaacctgacagagatagaacaaccaaaagtgaaaacttcaggccaatatccttgatgaacatagacacaaaaatcttcaacaaaatactagcaaattgaatccagcagcacatcaaagagctaattcaacccaatcaaataggctttagccataggttgcaaaattggttcaccatacacaaatcaatgaatgtgattcatcacataaaagaactaaagacaaaaaaccacatggtcatctcaacagatgcaaaaaagggttttggtaaaattcaacatcgcttcatgttaaaaaccctcaacaacttgaaattgaaggaacatacttcaaaataataagaaccatctatgtcaaaccctcagcctgcatcatactgaacaggaaaagctggaagcactccccttgagaactggaacaagacaaggatgcccacttccaccactcctattcaacatagtactggaaattctagagctccaaatagaaagagagaaagtcaaactatttctgtttgcagatgatgtcattgtatacctagaaaaccccatagactctgcctaaaagctccttgatctgataaacaacttcagcaaagttctagacagaaaatcagtgcacaaaaatcagttgcctttctatataccaataatgtccaaactgagacccaaatcaggaacacaatcccattcacagtagccacagaaagaataagatacctaggaatacagctaaccagggaggtgaaagatctctataatgagaattataaaacacagctgaaataaatcagagatgaaacaaatatatggaaaatcatttcatgttcatagataggaaaaaaatcaatattgttaaaatttggggcagtcatactggccgaagcaatttatagattcagtgatattcctgtcaaactaccaatattatctttcacagaattagaaaaaaaaaatattgtaaaattcatatggaaccacaaagagcccaaataggcaaaacaatgctaagcagaaaggacaaagccagagtcatcacagtacctgacttcaaattaaactgcaagactgcagtaactaaaacttcatggtactgggacaaaaacagacacataaaccaatgaaagaagctagagaaacctagtaatcatgctgcacacctacaaccattgatagtcaacatttgtcaactcaagatggattaaaagacttaaacgtaagacctaaatctataaaaatcttagaagaaaacctaggaaattatattctagaaatactattctaggccttggcaaaaatttcatatgaggtctccgaaagcaattgcaacaaaaacaaaaattgacaagtgagacctaattaaagagcttctgcagcacagcaaaacaaactatcaacagagtaaacagacagcctatagaaagagagaaaatatttgcaaactatgcatctgacagaagtctgatattgagaatctatatggaactcaaacaaatcagcaagcaaaaagcatccccatttaaaaatgggcaaaggacatgaacagacatttctaaaagatgtgcaattaaccaacaagcatatgaaaaaatgctcaacatcagtaatcattagacaaatgcaaatcaaaaacacaatgagattccttctgacaccactcagaatggctattattaaaaagtcaaaattaatagatgttggcaaggttgtggtgaaaagggaatgcttgtgcactcctgttgggaatgtaaattagttcagtctcactgtggaaagcagttcagggatttctcaaagaatgtaaactagaactaccatttgacctagcaatcccattactgggtatatacctaaaggaatataaattgttctattaagttggtgcaaaagtaattgtggtttctgccattaaaagtaatggcagaaacctaatgaaaagacaaatgcacttgtatgttcattgcagcactattcaaaatagcaaagacctgggatcaacctaaatgcccatcaataatagactgggtaaagaaaatatggtatgtatgcaccatggaatactgtgcagccatgaaaagagcgagatcatgtcctttgcagggacatggatggagctggaggccattattcttagcaaactaacatgaacggaaaaccaaataccacatgttttcacttgtaagtgggagctaaacactgaatacacatggtcaccaagaggggaacaatagacactaggacatacttggtgtagaggctaggagaagggtgagggtcgaaaaactatctattgggtactgtgatcactacctgggtgatgaaatagtttgtacaccaaacccctgggacacacaacttactgatgtaacaaacctgcacatgtatcccctgaaacaaaaataaaagttgaaaaagaaagaaaataatgtttatacttagaaaaaaaattatctttcttctagcctgagtgataaacattttttattattatagtttttaaaagtttggaaaactgcctttaatctgcacaacttttattagtattgttgtttgaaatttaagataatcaaatttggggacactcctattaagtttcttttatttgtgagctattacaacacccttactcttactgcagattcatagctgatgagttctattttgtgcaattagcatcaaaaagaaaaatcaagtcagccgtgcatttataattgtgttcagtgcattactaagcacattcctaaagagaaagtatctccatttgcatcatcgaaaaccaagtagtactccacatgtatacttttacacatctgactattggttgaatttccagcagactcaatttctgtctctatgcattttactcctgtttgtctcctctactagtctaatttccatgctgggtgttataggacacattaatgacacgtgacttctggtcccacaaatctgtgtcacagagctaggacagtaatgggcccaggcacattgaagcattccaggaactcattcctatacaatgacgatgggtgatgacttaagcacacaccatagtgactgcagaccatgtaaatatatcccatgacactcagctaaatgtctccctgactcaacctttcttaaccaatctcaaaggtcacatgttgattctaacatttccctacatgagcgtacacagaagacagagtagaagaaccatagtgaacatacagcttggtcccctcccaagaccttagtaggggccagtgtacatgagggcccctgaagcttcatttccttcctcgtcaaagcatgtttatttaaaagtatttattttactctggatacttcctcagaaatagttattcctttccttttttccctccctctctccttacctctgtcttttcctcaaacatttatttagtgtatactatattctagaccccatgttgaagaataagatacatatgctgatgtctacagcactgcatagaaagtaatgggtaacctaagtggttacaaataaaatctactagctatcctggtgatttaaaggccaccttcagctgaatgttcaggaaaacctttatgaggaagtagcatttgatctaacctataggaccggtaggatagggcctgggtggggagactgggagatggaaaggcattccagtgtgctggtgctgcacatggtgggacttctatcacatgtattctctatctgtaacagttaaagttttttggttacttggcctgggtaatggcaaagcaaatgtactaaaagaaactctggttttgtggccacctcagttcctttggagaatgtcctctctcagctgaagctgagaacatccagtcacatttctgttctggaaccccttaagctgtttctgtgacaacatctgaaagaattaagctttatccaagtcaccagaaaagggcttacgttaactgttttcactaagactctacgtttcaatactaacacttacggacaagtggaaggtattcttcagttgtatttggtagttcttctgtagcgccccttttgtcttcctccatttctctcttgctagccctcaactctaccccacgttcgttttcattatcttttttctcatcccccatttcctgcttatttgtttattctggtggctcttctctctctcatagacgacatagaagcatggccttctttctgaactttccttgacccagagggagaaaagtctaacatactatcttatttatgcaatctgaggaaagttgttggccagccatcacccagtgtgacctagtgacagaaccagtagggatatctgagtgttcagtctttgaatgattcttccaagtcatatagatgtgttgattacttcaatcttgaacaagatatgttgtcactatcatactgggctatgagtacttgagaacagggaactgtgtagtaaaattcaccacatatgctggtagcacacaggcatcaaccagtctaaacagaacccacccgggtcacctcccacgtcactgctaagacacagttctttacacagaccatgtaaatgctgttgtgttgttttgtcaaagcttctatcactcttcttgctgtaatttgagaagcaaaagcattaataaccagttacttacataactggtattgtaaggcttactggtggcagacagcattcctgtgagcagtattagcacacctctcgatgagaatggctgtgaactacattctttggagtaacaataagaaagactatacaaaacctggtcctctgtctacagtgaatgaacacgctcatcttttcttcccacagtgatttttttccagataacatattctaatggcatgagtatattaaaataaagtcagatagggtgaggaggggcatgctaacaaaaataatctgtcactcttgccaaatggaggtaatacagtcacaatatttacaagtaaaatggcagggatgtaattgaaagtacatctatatatcatctatatatcattcatatcattcttcaagctgttatcacagttccatctttgactgatgcctcttcaatatgttgtataatgtactatagagttattcctttttactcttttgctcatggaaataatttgaaggcttttaaccttctgatctcatttttcactttgttccagacatggcttactctctctgccatggaactatcagataaaatgcataatttgattagaccaaaactgtactaccatcagtctgtcggtcaacacaagatatattttaaggggatctacacaaaagtctgcatgaaaatattccatataaagaatagttacataaaccttaataaaaagaaaatactgggaagcacttagtgtctcagattctggaatcaaagctctctttcttttcgtttcttttctcagcgattcaaatgaccactctgatattttctttgccaaattaactttagcattggaggggcgtttatatagtatctggcttaaagctattatttttctcatttgctctgcagacatttattgatcacttactgtgtgccaggccctgtgataggaatggaggtagagaagacacaatcccttgccctcaaaggtttcagtgacagaagaaatagatgaagagaatgaggcctgaagtcatttgctcatggtcctacaggcacagagcaggggtgcccaacccccgggccatggacctctaccagtccgtgacctgttggaaccaggctgcacagcaggtggtcagtggcgggcaagtgggcgaagcttcatctgtatttacagccactccccattactcacattactgcctgaacttcacctcctgtcagattgcagcggtattggattctcataggagcgtgaaccctattgtgaactgcacatgcgagggatatattttgcgtgctccttatgagaatctaatgcctgatgatctgtcactgtctcccatcatccccagatgggaccatctagttttgggaaaacaagctcagggctcccactgattccactgatggtgagttgtataattacttcattatatattacaatgtaatagtaatagaaatagcatgaacaataaatgtaaagtacttgaatcaacctgaaactatccccatgccccaatccatggaaaaattggagaccacagaactggtccctgatgccaaaaaggttggggaccactggcatcgaggatagaatagggaccagaaagagattgtgcagccgtccttctagatctggttcttgtcaaccactccatctccctaatgtgggacatggcagaagagttacaactagagtaaaataattcttgttgtgagttgcaaactttatgggctccatgtttaaattatattattaaaatatgtattttgtgtttgatattaatctcatagacatttaggagaacgattagatttctgatgcctctaggcattcagaagtctctaactcacatgctgcattgtctgaaaggttctattttgtgatagtgcttcttgggcatcagtggggacagcttagaaagcttgtcgttgcatctaaataaatactgagagtttggatatgtttctaagttcctttcctttgaactgtggggcataaatctcacgagacagcttgttctcaagaggttaccagtacgtttggttctagtctgtccacaaatattgtgagaacaggcttattcagattattttgacatgctcagacaaggcgttccgaaccatgtgagaaatgaacgtgtgtgtgcaagggaaatacacacaatgctactgagcctctaagaggctccatttctcgtgttttgaggagtggaaattgtctcaaaaaatcagcatctcagctctcattcctaatgtatcagaatctagaagttctggttttggaatctgatatagtgagaaatcagaagatgtcctggggtgtgggagaatgatatgttctttagtcgagtttaaatgagtttattccttaacttagcacttccccagtggcacaataagcactcagtaaatgtttattgaagtgaattccaattcctgatttgaatttagtgttggagaaattccagtcaccgggctgataaaaagtggtgtcagattactggaaaaaggactatgtggagaagctgcttgcaagtaataaactctttgtgttagagtcacctgttttacccaatgcctagcctagatcgttgaaaaggaaattgaaggatggtattcagattaagaaacagatccctggattatgtttaagaatttctgggaggagccaagatggccgaataggaacagctccggtctacagctcccagcctgagcgacgcagaaggcgggtgatttctgcatttccatctgaggtaccgggttcatctcactaggcagtgccagacagtgggcgcaggtcagtgggtgcgcgcaccgtgtgcgagccgaagcagggcgaggcattgcctcactcgggaagcgcaaggggtcagggagttccctttcctaaccaaagaaaggggtgacagacggcacctggaaaatcgggtcactcccacccgaatactgcgcttttccgacgggcttaaaaaacggtgcaccacgagattatatcccgcaccttgctcggagggtcctaccccatggagtctcgctgattcctagcacagcagtctgagatcaaactgcaaggctgcagcaagactgggggaggggcgcccaccattgcccagacttgcttaggtaaacaaagcagccaggaagctcgaactggggggagcccaccacagctcaaggaagcctgcctgcctctgtaggctccagctctgggggcccagggcacagacaaacaaaaagacagcagtaacctctgcagacttaaatgtccctgtctgacagctttgaagagagcagtggttctcccagcacgcagctggagatctgagaatgggcagactgcctcctcaagtgggtccctgacccctgacccccgagcagcctaactgggaggcacccccctgcaggggcacgctgacacctcacacggcagggtattccaacagacctgcagctgagggtcctgtctgttagaaggaaaactaacaaacagaaaggacatccacaccaaaaacccatctgtacatcaccatcatcaaagaccaaaagaccaacattagacagatcaacgagacagaaagtcaacaaggatacccaggaattgaactcagctctgcaccaagtggacctaatagacatctgcagaactctccacccgaaatcaacagaatatacatttttttcagcaccacaccacacctattccaaaattgaccacatacttggaagtaaagttctcttcagcaaacgtaaaagaacagaaattataacaaactatctctcagaccacagtgcaatcaaactagaactcaggattaagaatctcactcaaaaccactcaactacatggaaactgaccaacctgctcctgaatgactactgggtatataacgaaatgaaggcagaaataaagatgttctttgaaaccaatgagaacaaaggcacaacataccagagtctctgggacgcattcaaaacagtgtgtagagggaaatttatagcactaaatgcccacaagagaaagcaggaaagatccaaaattgacaccctaacatcacaattaaaagaactagaaaagcaagagcaaacacattcaaaagctagcagaaggcaagaaataactaaaatcagagcagaactgaaggaaatagatacataaaaaacccttcaaaaaattaatgaatccaggagctggttttttgaaaggatcaacaaaattgatagaccgctagcaagactaataaagaaaaaaagagagaagaatcaaatagatgcaataaaaaatgataaaggggatatcaccaccaatcccacagaaatacaaactaccatcagagaaacctacaaacacctctacgcaaataaactagaaaatctagaagaaatggataaattccttgatacgtacatgctcccaagactaaaccaggaagaagttgaatctctgaatagaccaataacaggatctgaaattgtggcaataatcaatagcttaccaaccaaaaagagtccaggaccagatggattcacagccgaattctaccaaaggtacaaggaggaactggtaccattccttctgaaactattccaatcaatagaaaaagagggaatcctccctaactcattttatgaggccagcatcatcctgataccaaagcctggcagagacacaaccaaaaaagagaattttagaccaatatccttgatgaacattgatgcaaaaatcctcaataaaatactggcaaaacgaatccagcagcacatcaaaaaacttatccaccatgatcaagtgggcttcatccctgggatgcaaggctggttcaatatatgcaaatcaataaatgtaatccagcatataaacagagccaaagacaaaaaccacatgattatctcaatagatgcagaaaaggcctttgacaaaattcaacagcccttcatgctaaaaactctcaataaattaggtattgatgggatgtatttcaaaataataagagctatctatgacaaacccacagccaatatcatactgaatgggcaaaaactggaagcattccctttgaaaactggcacaagacagggatgccctctctcaccactcctattcaacatagtgttggaagttctggccagggcagttaggcaggagaaggaaataaagggtattcaattaggaaaagaggaagtcaaattgtccctgtttgcagatgacatgattgtatatctagaaaaccccattgcctcagcccaaaatctccttcagctgataagcaacttcagcaaagtctcaggatacaaaatcaatgtacaaaaatcacaagcattcttatacaccaacaacagacaaacagagagccaaatcatgagtgaactcccattcacaattgcttcaaagagaataaaatacctaggaatccaacttacaagggatgtgaaggacctcttcaaggagaactacaaaccactgctcaaggaaataaaagaggatacaaacaaatggaagaacattccatgctcatggataagaagaatcaatattgtgaaaatggccatactgcccaaggtaatttatagattcaatgccatccccatcaagctaccaatgcctttcttcacagaattggaaaaaactactttaaagttcatatggaaccaaaaaagagcccgcatcaccaagtcaatcctaagccaaaagaacaaagctggaggcatcacgctacctgacttcaaactatactacaaggctacggtaaccaaaacagcatggtactggtaccaaaacagtgatatagatcaatggaacagaacagagtcctcagaaataacgccgcatatctacaaccatctgatctttgacaaacctgagaaaaacaagcaatggggaaaggattccctatttaataaatggtgctgggaaaactggctagccatatgtagaaagctgaaactggatcccttccttacaccttatacaaaaatcaattcaagatggattaaagacttaaatgttagacctaaaaccataaaaaccctagaagaaaacctaggcattaccattcaggacataggcacgggcaaggacttcatgtctaaaacaccaaaagcaatggcaacaaaggacaaaattgacaaatgggatctaattaaactaaagagcttctgcacagcaaaagaaactaccatcagagtgaacaggcaacctacaaaatgggagaaaattttcgcaacctactcatctgacaaagggctaatatccagaatctacaatgaactcaaacaaatttacaagaaaaaaacaaacaaccccatcaaaaagtgggcgaaggacatgaacagacacttctcaaaagaagacatttatgcagccaaaaaaacacatgaaaaaatgctcatcattactggccatcagagaaatgcaaatcaaaactacaatgagataccatctcacaccagttggaatggcaatcattaaaaagtcaggaaactacaggtgctggagaggatgtggagaaataggaacacttttacactgttggtgggactgtaaactagttcaaccattgtggaagtcagtgtggcaatacctcagggatctagaactagaaataccatttgacccagccatcccattactgggtatatacccaaaggactacaaatcatgctgctataaagacacatgcacacgtatgtttattgcagcattattcacaatagcaaagacttggaaccaacccaaatgtccaacaatgatagactggattaagaaaatgtggcacatatacaccatggaatactatgcagccataaaaaatgatgagttcatgtcctttgtagggacatggatgaaattggaaatcatcattctcagtaagctatcgcaagaacaaaaaaccaaacaccacatattctcacttataggtgggaattgaacaatgagatcacatggacacaggaaggggaacatcacactctggggactgttgtggggtggggggaggggggagggatagcattgggagatatacctaatgctagatgacgagttagtgggtgcagcgcaccagcatggcacatgtatacgtatgtaagtaacctgcacaatgtgcacatgtaccctaaaacttaaagtataataataataataataataataaaagtttgggacgaaaaaaaaaaaagaaacagatccctcatggtatcccataaaagttaccttaatttatgaaaatccaacctgtgcaatatgggtatcttttttacaatagaagtgatttatatgggctactcttcccatagcaagagtctcattgccttaccatatagctcttttggaattttttttttttaaacttgaatatatcagaatgatagtaactggccactggagaaaaagctctgacctcaagccaaagagcaatctgtctacatgtctataccatggcagtgattattgataacacaactgattattgtaatcacaacttcccatacagaaattactatttgtattattctccaaaaaataaggccaaatgccataatgtgttttttcagaaacagtagaacatactcttagaatgatgtgagtgcacactcactctcattctagtttattctaaacgagaatctgagatgaatgttccaaatctctccaatcacaagggaggagggtacatttgcagtggatttttctcagaaggttaaatctaaagaagtaattaaggctccacatttctgatttgcaggaaactgcgttatgcatttcccttggatgaaaataagtaaagaggataaaggaagactctcaaattgcagtctgtgtgacctgtttttgaataaacataatcatattccacagtcaattatctccaaagtacagtgtgttctccagccagagcgagagagtgagaggaagaatgtcagttagaagtggttagagaagaggacacatgcatagaagtgtacatctttctattgtcctctgaaaatttttatacgatttgggaggggttagtggggaggattatacagtatttttatgtgatttcataaatgtcaaatttcagtcatcagtaagagaggcaagcacaggtaggaaaacaaaatgagatatgttatgttcagcacagtaataaggctcctaataccaaaggaaaaacaagtcagtagttacaactattgaatagaagtggtctaatcggagcagcaggatgcgtatcccattttattatggcttcattatgtgttttgcaaggctctttggattgccattaaaataattttgtgcagcagcactgtgaggactcagaatccagaagcgtaactattattttcttttcttctttgttttctttttgaggtaaagttggcagcaaaggaaggtttcggatggaccaagtatagacacaacacttctgttaattcacatggggactaggcagcctcccacaatggctgtgacattcatcctgttctgatagaaactccctgctttctgtgtggcctgggatttgaatctggaggtctttgatccttagcctctcccgtggctggttaccggatggaacggacctgatctttcatttcccaaagaaggcctattaccatcagaagcaaaccgcatccttgcttttatagcagttgcgcttgataattattggtgatactgacatctgcccatgcttacttcatattcatgagcctgaagtggaattttttttttaagctaacatccccagttttggggaatagagtatttcctccaaagttaaaccctgaggtttatttcagaaaaccagtagtcaagtacccttcttctcactgagctaagaaatcctcataaattatttatttcccattttagacattggacagtgactcagtgtgccctggaaatattatcactgtattaattttctcatgtggctcagcataatgttagagaaatggatagttacaggtccagacactataaagatggagctaaatattcttctaaaaataggatgtttggttaacgtttagtagtcaacaactttcctgaagccacacacagtgccggactaagaaatggaataaatgtcctcatacagtatttggtgaagtctccctttaggagattaagcttttaatgttaaagattcagagtattttagctttatccctgagacttattatttgacgtgatgacatctttaactcaagaggtcaacaattgggataaaatgccatgctgtgggtgatggacgccataaaagtaacctgataatcggtcaggtgcggtggctcacacttgtaatcccagcactttgggaggccgaggcaggcagatcacctgaggtcgggagtttgagaccagcctgaccaacatagagaaaccctgtctctactaaaaatacaaaattagctgggtgtggtggcacatgcctgtaatcccagctactcgggaagctgaagcaggagaattgcttgaacccgggatgcagaggttgcggtaagctgagatcgcaccattgcactctagcctgggcaacaagagcaaaactccatctcagggaaaaaaaaaaattaacctgataattgagttttagttataaaagtgccaaaatgctaaaagaatttacagtttctgaccactgaaatattttgctctagcctgggtacaagaagaagcgagtttgagactaggaatgaatgagaggaaacttttgattcttactacataggttccttttagaattttgaatgtttagagctagaaattgaatattcattattctagcccagacattttacagaggagaaagtcaaagtttcagagatgaaagttgtacccagggccacacagttaggttgctgcaaatattaagagaacttacttcacttaatttggtgcatttttattcttctatttatagacgagtaaaatgtgctgagaccagtgcattttaagctccaagactgtcacttcttcatttgtcttaggcttttagattcaattaaataagtaatgcacctaaagattcatcagctgggaatactgtctcaccactgaatgacttaagagagataatattgccttgctgaagacatattataaaaatctgagaatgagcatgtgtgaagctctctgatactcttacaagaagtgaagtataagtagttgtggattccttcaaatgaaacaaaatttttctggacgcctttttagatagagtatatgcaacccaggagtatagatgtgatgtctcctgtcctgtgcaggagtataaatgtgatgtctcctgtcctgtgctcaggcaggttaggattctggcagaccatgagacacccctgagccatcactttaaaatgccccgtatttcagtagcgtctatgtgctaggatttctgtttgggagtacaaaaagcaatgagattgtttttcttgagtaacctgaagtctactgggaagaacccagtggtaacccaaatagctatgacacaaggtagaaaatagtaccaaggtagatagagataaaacctttgatacttaaaggaagacagaaatactgctgactgggaattttagaggaattttcatgaacaaagatcagtaacatcatccactatccatgaaatattgaactataaggcagttttagtactgggaaagaaaaactacatcatacctaccagtaagaatctcatgatcatcatattttaataaaagatgaagaggtaagatcgcttattctgtgttccaaagaaattcctggaggagaagggatctgagctagactttcataaatagagatgatttggatagaagaacaatttagagcatcctggtttgaaagaacaaaaggatctaaggcagtagccctgggaatgtacttcacaagttcaggatcaatgagtatccagtttagctaaagaaaacaattctagtgaaagaagtaaacaaacgtttggtaggatgaaatggttccatcttatggagaagcttaaatattgatccaagaattttgaacaccctagtggacttcaggagaaccttgtgactctgagcaaagataaaaataaattgatatgggaaatgatgttcctttcagattagagaaactcctgaattaatctcaaatttggaggccgcttagtataacaaaaaagtatattttcaatattgctgatatgtaatctaagaatggttctctcttcctgtcactgaaattcatctattatttattccaagctttaaaaaaaaagtactaaaataaaattgtgtgattgagcattgcaaaagagtgggtttttataatgtggaagccaaaattttttatcagaaaagaaaagagaaaaaagaatctatgctgagaggagatggccaactactacatagatttattaactcaacaaaagggtgaccagttcttccaaacctggtatttgttggtcgtatctattacaaggtagctgtggcttggtgcagggtgcagacaagagagggaacaggaagaaagagattagtgtaaactgtgaaatcaggcaaagctagactcaaattttgtctctgttttctagtaactatgtgtgaccttgaattattgaagctctctaaacttccactttcttgtttgcaaaatggtacgatggcatctacatatagaattatagtaaagagtaaatgagaaatacatgtgaatacctagccgcttctggaaaatagtatgtactcagttactggttatttttattatcgttgtaattactatttccagtgatgtgatgcttattaccttccaaagcaagtacttttatatttgaataagtgaaagctctttcccattatttctaaacccttgtcctacttctcagttctagaactttttttttttttccttaatggaaggaaagaaataaggaagggttggagagagagagagaggaaaagcacctttgtttgtatgctttctttagatacgttgaagacaatactcacaaatctcttcagtcgtctctccatttggatggccatcctcagtgcttaagcacttcttcataaatatgattttcagaagcatctgaagcatctgtattcggggtcctgtcctcatccctgttaagaaatataaggctcaaaatcagatgttgttatgtgaggtgtggtctcgtgcatggagtacaaggtcacttttcattaggagacaaatgcgcagtaatacctacagtgtgggaacgtggatcccttctctttaatatcagttttgccagtgccctcctttgtaacccagagtagcttcagataaacctactgagcccttcttttcttgttcataggaaaatatttttaaagggatagtgcatttataagaaaatttttatatacttcttttaccctgagaggattgcaaagtttgtcatgccctgattgacaaatataagttcaaaaaaaaaaacagaaaataaattccttaaataatttatatcagacaaatggatctgaatctaagcaaaattttcaggaaaaaaaatgtttataatcattaggtaaaagtagaattctgaccttatctttatattttctttatattttaaagctttgcctacatattccaagacttggctttcagttttcctaaatctaaacagagaaataaatgaaatcatgtctaagatttcttccgattttgacattgttatatgtccttacctgtaaaatgaagaaaatattttttctttttatcagggttgttgttaggaagaaatgatattatggatattgtgtttcagcctgctagggacagatactttcatagcttcattcattcaccctagggtaaaagtatcagtgttttcttctttttccttcaggatttattccttagtcagggagtgaccaaggatggtcagccagaacctcagctggtcacctggagcataatatggtaaacagaaccatacccaaagttctgtttacggaggcagtcctggctaccagtgaatgatcaggaaccctataagctagcccctggaagaacaatgatgctgattttatctgtaaaataattctttgcatacaaagtactataaactcagttggttctccctgcatatttttgaatgattgtaggcagagtttttgttatctgttttactaatgatgcaactgaggcccgtaggagtcaggttgcctataaaggcaaggatgtgcatacagaattacccaaagcaaattggtattttgtggggcacaacctcaaaaccactgatatcttgctacatttaagtacaaaaagctcctatatgccacagaattagaacattaccagatcttaaatgttccttagaaatcacctcaactgatgccccacatttggcagaaagccaaaaagtttctcagctaggaacaaaacacaagttccctttctatcacatggtgctgaagcttagatgcataaaccgaacaaatcatcaggaagctataaaaggaacaaacaaatacagtctctggaatcattgcaacctcaatacacatctcattgccacttcctggacatttgtgtctagctaggttgcttcccctgcctgagccttactgtgaatatgtgccaagcagagtgttgctgttaattgagctagataacatgccagtgtctggcctagttcttggcccataataggtattcaactaatatttacttcttttcatccactcacccttcttcttaacagttggaacccctgttttgaactgttcacttctactctggatttccctgtgtaagctcacttgcagaagagggtggaggtgaacacactgcatttcccaccatccagctctgacctgggcccaccctgtgcaggactctgctgactttgggatgccagctgtggtcctcacacagggctcactgtatccgggggcctggcttgatccggtaaagagcgtctgctgcggtgcctgatggaaagtgcccgcttaattgggagatagggcttcatgaatggatctttcattagttgaaaaaaaaaaatatttgcctgcaaggactgtaaacagaagacttgattcacttgttccttttctcctgccctctcttgggttttgtttgacttagcgtgtttatacctcaggacacagctggtactaatgcctttccaaggttaagaaagctttccctgccattccctatggtcccctttgtgtactttcaagagacaataaaggaggtgtggatgtgagacagagagtgcattcacattagtcctggctattatggggacctcagaacaagcatcacctccaccctgtctgcatggatttaagagagagcatctgagcacctgagcttacctcaaacacgttctttgaagaagagtcactgccggtcatttctgtaatgtatcacagctgtcctgacctgatccttctctgctctatcgtggctactttagcatatttttctcaaaaagtgttcctctttcataattaaaggtgagggaagactggatgaaaaaagctgtgggatatggtcagcacataaggcctgtggtcaaagatgggtcttcagttacatcgtttggtcttactaagcctcaatgttctcatttgtaaatctggaataatcattagacctttttcactctgcttgttgtgaggttcaaacatgagactcaatgaaaaagtactttttggacaatagaacactacataaataggaaaattttaatggaaccttcctcatattccattaatatgttggtgctctgcattatagtagtactttagttgacttgagcacatgatgtagttgactttagattaaactttcactaagtattacttagaaaaaacgagccatcatgtgattctacaatctttatgggctacatagggatggtgaattcttttcaccactagcaaaggctcctaaaggatcatgccttactcccactccatagatgaagaccttaggcccctgggaatccattgagctcacagaggtttacataatgccaaatcaggatgggaagttagatcctgcttagtgctcataactggcttatgaggtttccatttcagacaatgaatactcatcaaggaggattggtggggaaccatgagctgttcatgtgtactgctgcactcacgtcgtatccagacacccagatatcatctctggcccactgcagtaagatctctgtcttctgtcctgtttgtctctccttcattcattccttcatttgctctatctagccttcatacttcttgaatcactttgagtatggtacccttattttaaataaatagtaccctcatttgggtatttgtttccagtgttcctgaggctggggaatttctccagagtttaatgatgactctggtgctcaagcaccaagaaaatttccacttgagatggatctggcactggaggtttattttttcccctttctattttattgttggccagtttgggccagcatgttgctaggttgtattggtttcttagctcttgtaaccaagctaagatgcacatgtcaaaaaatattttttcttcctctctaaaaaggtttttcctcttttctgtaatgcttcaggaagggaaaagagtgtttgcttgattctaattctggcatatgaagtgtttgctacaaaatgtttttatcactgtgttatcttgtcaaagtgctatcgtcattgtcattttcagtttaatagcaggaatgttccattttcacaaaggatattccatattttaagtaaactcaacaaaggaaatttcaaatgcaaaaaaatattgatagtgagaagctaattagtttttttatttctcaaagccctacatttaaaatagctttaagtttccagtatgtcatgctctgacagtagcatttacaggtaaaggatgatgcttaactaggattatggttacattgtaaacactcaagccaaagaaaaatatatccttggacaaaggggttaggatgatttgccagagtggcctccagtgtttggatgacagctacatcactgtgatttaatgcacctttagtttcaggagttgtatccagactagtcctcatctcagcctcaccaaaggggactggacttaaccacaatagaactcagagctcctgcagtgaaacccagtccctttccatgcgggaagtgataaccgcaggtgaaactctgagctagggaaataccatcttggtagtcctgaagtgatagcacttacattcttttgccaggcatccaaaatcctttattcttcaaatagttgtgaaggtttttttttattattatataaagccttgcagtgagtcatagaagaaatgcactggggtctgagacagagagagagagatgaaacaactataattcctgagtcaactatgattcctgtcttcaagagtctcatgattaagaaatggagacaaagcagaaataactaattccaacttcctaagctaaatgtcataatgaacaaggaaccaaggaagcacatagaaggcttaggtaaattcttcctgagggaattcctctgttataggtaataattattaagcttccaccttgtcttgtttctatgtctctattattatttaatatttacagctaaagctatctatctatctatccatctgtctgtctagagttcctacctaatggtatgtttcagattaggatagatttctcacttgaaacagtctgtctgatgttttgcatccatccatccattcattctacaaactgttatgccctctatatggcaagcattttgctatatccttactacagaattcacttaggcactaatacctattttaattatggagacaaaaacagctaagaaaatgttatcactccatagatgagttaaagaaaaaaaacagggagaatttcttgaaggtgatgtcaatattatcataaactcaggcagtccatgctgaaaatgatttttttgtgagccagaatcccctgtactcatcatttattccctgatttactgcgttttattctgtatcagatgatgtgctagcataaagcggggacataacatcttctgatatcatgagacattgtttctaaacctcttttcttggtgattagacctatgcttgtgcccatcagagtcaaaggttgtggacacttgctccgctgcttgttttttctgctatcttctgtccttgttggttgcattctaatggacctataccaagtgctgtcagaagatgagagactacaaatcagattccacaaggatgttcacaaataataagcatttggttgcaatttaaaattggttggcagagcaatagggcatttgattattaggattttacattatctgagtgacttggaaatagaaaagaagggacttgtattatatgtccagaaaaaaagtccagcaaactataattcataggcaaaatccagtgcactgctgtgtttgtaaataaagttttattggaattcagtcacgcccatttgcttatgtgttgtctatgtctgatttctgtctacttggtggcattgactagttttgagaaaccaaatgacccacaaactttgcaatatttaccgtctctttattgaaaaggcttgaccctctataaaaacgaattaatcctgaaggagaagaaaaaataaatagggaccctaatcatatttttaaatttatacagcatgcagttttgaaacactcagtcaatgatgtagaacaattaaaaagaaaaaataaaacctgggctaagatgatagacaaattccctttcaacttcaaccagtttgttctgaggatattgtgtgcttcaggaatttctgccatatgctgggatattcagacatatataacgcagtctgccttccaggaacccttagtctgttagtggagatggacatagaaagcagcaaatactcctttgtgtaactcatgctgtatatgagataagataatgaggcagagaagagttggagagtagagatggcctggcttttgggaatttggggaagatatcataaaacagtagaaacttaaactatgtttgaaagcatgaactcatgatagacgggcaagggtagaaacaatcgttttatttctagaagcttcaactctatcttgaaatagtttgttgtgtatattagtccgttttcacgctgctgataaagacatacctgagactggacaatttacaaaataaagaagtttcaatggacttatggttccacatggctggggaggtctcacagtcatggcagaaggtgaaaagcacatctcacatggcaacagacaagagaagagagcttgtgcaggaaaactcccattttcaaaaccatgggatctcacgagacttatttactatcatgagaacagcacgggaaaggcctgcccccatgattcagttacctcccaccaagtccttcccacaacacatgggaattaaagatgagatttggatggggacacagccaaaccttatcagtgtgtttataatggcaccacagtttctaaagtattatccattatctttttggtctttataacagaggttggttgtaatcattatctccattttattagtatttcttaaaaggcttcatcaaagcagttaaatgactttttcagggtttcactgcttataagtggtaaaagttacctgaccctacctctgactctaaagccacaggactgtccccttaaatcaaactttctggcctaagtctacaggtattccccagaatttctaattgacatgaaatgcaagagaaaagagtctttgaattttcctgcactggagcaacctgccttattccagacattgccaagaaattgtttttgccactgacattattgcgcatgctgccagtggaagtaatagtgatctggacttcatatgctttcaccgaacatgcatatggctcttcttattagactgtcatagggctcccttactttcaactttccttggaggtttctctattttctgtcctcttttcctttccttgtttctgataccagcctatagatcctctgtcaccagttgggtttcttcatcacatggttttctccttctcaggtggagttttggccagagggaggagaatctgttcaattaaacagattctgtacaacagattctgtataatgcaaaacagaaccgattctgtaaaatgcaaaaaaaacccttttctcttgcatttcagatcaattctaaattctggggaatatctgtagacttaggccagaaagtttgacttgaggggacagccctgtggctttagagtcagaagtagggtcaggtaagttttaccatttataagcagtgaaaccttgaacaagtcatttaactgccttgatgaagcctttaagaaataataattaaacatcccctggtatttgagaaaagaggtatcccaagtcccaccatttaccaggtcctattactcacaatgctggtaaccataggtctccatcccttatgctcactcctcttaccacgccctgtctaggagctacttctacatttatgtgctcagtcttctatccagaaccctacccccaaatgtctaagctcctcacacctcagttctctgtcttgggccatggaacctctaacactggtttggaagtgtgtgtctttttcctcaggcagctggagcagagactgattccactgccaattcttgcctcaagaagagtcgtcttgagacaataggttgaagctttcactacatgttcttttagcaaaaaattataaagcatagaggttgagatgggctctggaatcagactacaaagattctgatcttactgcttcagttataagctctggatgttgagcacctctcctaatctccccaagcatcatctactgaaagggggcatcacaggacttccctcattgagctgttgtaaggattaaatgagcacatgttaagtttctggctgtgtaagtttttgttattacttttcttttgtacttgaacttgtcataccatgtttctattttgggttcagaaaatatggttaacataattataggtgtaatagaaattttggattagcctgtgaacataacacacaattatagcactgttttttttaatgagagaatgaattcctgagttctaaacagatgagttacaaagaaactcttggactgaagtcatccatatataatagatggtccagtttggagtagaagactgactgtgaaagataattgaaagtctgcaaaaatattttttactaaatgcactgtctttttgagcttgcattcataggcacatctaacgcacctgccccaatgtaaccaatcaacatcacatacagccctcagttactaagtttatgaggtaaatttattttccttcttggtttttgtttctttgcattttgatctttttatctctttgtttattaaataagaaattagaatctctgatcagtagattggctaggatctgcttatgagtcttagatgcaaaactgacaaatctttaattggttgtgccatcgtatctgtcctcaggcttgttagctaaagctcagttagtgatttgccaccactgccattgcttggtggtagaatagggtaaaggattatcatgccagcatcccttgtccgctgtgaccttagtcttagtgaacaaattttcttgtgtgctttctaaaatgcccatgacccttatttcatacttaggaaatagaagtcacaaagatttcctgaggacctcatcattatgtggagctaggaaaagtactgtggtttatagctctgtggtttacacaaagggaaatccaattgatttgcacaaatacacaaaacaaaatatatttaagtgccatgaagagaaacgatgttctttaggaattaagaggaggttcagaaggaaaatggtgttgattgaatctggccaactgagcttggacaatcagtgacctcagggaaaggagtgttaggaaagagacattcctgacagaggaaataacataagtagacagggagatagaacattctggaaattgaatctgtgttaaaatgccttaaaaatggtgcatcatacgaatttagcgacatttcacttcaagattcttacacaccttagggtgaaaatcaacaaagaccttaaaatgcagacaattaactctttttctctgtgttgtgtgtgtgtgtgtgtgtatgcgtacacacatatactccacatatctccacaaatcaatgacaatatcaaatggagcaattttccacaattttctccaagaaactgcatgcttaagcactgcactcagcaaaatgttgtaagtccatcaatatttctcagtcttgctgagtttctgcatgacccccaatagcttacccagtctcttcctctataagtaatgatcgcagattctacatctgcaagtacaagaatcctttcacaaataaattccagaggactccaacctgcagtgtctttagtgagtcagaaattaggaagatagcttcaatttggttatacccagcaggaaggaaacaatcctaatcatactaataccaatggaatattgtagtccaggagtttgatggagtttgaccagcatcctttagaaaggaaaactgcataaattaaataatttatatggaacaaacatatgtgtaatatgcatgtaaaataaaatggcaccagttattaatcaggtgaatgcatatatatcatagagaagtcaactatgaccagaagatacaaaatgaactgttctttaggctcatgttttgttttgcaatacagggcaggatattctctcttcctttagccttaactgatctgcttccatgttctagtcacttgaacattgatatgcatgtaaaataggcccctgttcttccattaactagaaaataaaaaagtgcccagaagggaagtttccatttctagcagcacgttaaaaagtgccagagtttgatcaggaagtggtatcagggtcaagatgagggaaaggacatcagaaaaaaaagtagaattatcctgttcacttcaaggaagacacacagcataaggcgggttttagaaaaggattaagagaaaattggcagacagaattagggagattgcttaatcaatatcacaatataacgatgctgggtagaagatgcatggaagaagcatggattatctcaatgacgattttattttgaagatagtgtgattatcacccctggggatgctggaacattacactggggatttagtcaccaactgaagcagatctctgggttgaatagatcaccatgaaggttgtttccaaccttaagttttcttaaatttcagaagttcaatgagttcttctccaaggatcaaggaggatatctactagaaatctactatagaatagagagaattggtctatacacaagtttatttaaattaaataatcctgataccattttgaacttttcagtcaaaacctaccatatgcagctcttaccagtgacttcagtgcttccttatacaaggtgcaagcggtgctaatctcacattaaaaaaacactttgggccagttgcggtggctcacaactgtaatcccagcactttgggaggccaaggtgggtggattacctgaggtcaggagtttgagaccagcctgaccaacacggtgaaaccccgtctctactaataatacaaaaaaaatagccaggcatggtggtgcatgcctgtaatcccagctactcaggaggctgagacaggagaattgcttgaacccaggaggtggaggttgcagtgagccgaggtcacgccattccactccagcctgggcaacaatagcgaaactcagtctccaaaaggaaaaaaaaaaaaaaaaaacactttgattttagaaagaaggtctgtgcccaggcgctcccaggtgctgccaggcctcagaggaagggttctgaagacaaacctgactgcctccttccacatgctatgtctgcaaatattggctgccttcaagctcacagcctgtgacagcaagttggtttcatttcttaaagttgatcttcaaagccgtgaagcaatcgcaaactgtttgagatcccaaatcaaagaacagattgtgtagactcaaaaaaagcaaacaaacaattacatttaaaaacaaagtgttggaaaaaaccagcaacaacctttctgctcacctgccaaggccttgtggctaagcttctgtttttgccaaattgtagcaaatcacatcagacagtgtccttcttgtactactgacaggtgacccatttcctggtggttaaatctggagggatttgggagttcttgctcttaacatgactttcccactgactggatttgtgattgtaagcacatcacactcatttcctccatttgaaatgcaggttctctgaagccttctggcttgaaggaataatagtgagtaatacctaacattggcattgcacagcatgccactgagggctgcccaatagctctgtgaaagagatgaggaaacaggattagagaagggaccagctcacagtcacaggactagtaaattatgaagtgagaattcaagctttccaatatcccttgttcttcctactacatgataccacttctagctaaccactcattcagtagctcttgaaaaggatattctgttacctcctttgaagataatatttgatccctactttctcacagggctttccaaatagagtccacattggcccatttccatggaacattttgctggtctttaggtattttattaattgctgaattgtttaggggttttaagttgtctaaggagactatatctgaattcaattatttttttcctctttcccctcgagcatgcacattctttgtaatactgtagtgatgtataagttttcaagagctgtcaaggtgtatatatatatatatatatatatttccaaaagcagatagtatagtacatttactacagttgtttcactttgatatggataaaaaatgtataaaaaaggcaaagaattctgtgagtgtcattacaactttaatttcaaaatttttgcccttatgttatttgctatacttggctttcctcgacattataaatcattgatcacaggctggtataaatttagcattaccagtggattctgcgtatttgatatgctctttttattttggttttgtcagtttgctactcgtgagtttatctttgaacagcttcccatggctatgggattaggtctgtactccagagcctgatatctatgggcctttttttcttagcctttctagtctttttaccccatatttcttcatgatatccatagtttgtccaacctaaacaaagagctagtccccaagcacactaacccgttacattcatccctctgcttttaatacaattgtttctctatagagaatacctttaaaaatatatataagttggctaagctcaaaaacaccacttctatgataatactcttacagattcttccatttgtaaatatgcatgctcatagtactcttacagcgttggtcctctcttataacattgttagagtagatactgtaaactgaaaagtgacacataaaaatacataatggtgcagctcagatatgtgtcatcttaatattcctattaaccttagaactttgtgactgtgttgggattacttgacatatttgtttatcaatcaacacagtgacagtgacaacgaatgagtaaccagtgttttgtttttgaaacatttgaagaagtgttccatatttctgaagttattagtttagtttaggttagtttagtttagtttagttttaacgacagagtcttgctctgttgcccaggctggagtgcaacagcgtgatctcagctcactgcaacctctgcctcccaggttcaagcaattctccctgcctcagcctcccaagtagctgggattacaggcacctgccaccacacctagctaattttttgtatttttagtagagatagagtttcggcatattggccaggctggtctcaaactcctgacctcaggtggtctgcctgccttggcctcctaactgaagttattttttaaattaaactaatacatgcaactggcttaacaaactaataggactaatgagtctaaaacaaacgacataccctccgtgcttctcctctctccactctctcaatcctacttcacgaaagacactcttggctgcttcttcctggcatttgcacagcttcatgtctaaaacagaaatgcatttctatctttggaggcataaatcttagacattatctgtggattaataacacaaaagacacggatatgccatccatataaatgtttgactgtttagagcttcctactctgggaaggattgacccatctccctccaaaattgagaaaagggactttcactggacattatcttcaagtccttgcagtgttccagaaggtgtgacaatctggtcctttggctggctgcattactgacctgctgacctgctgttttaggttgattatatttgcctttgagccaaaagagttacttgatgatactccagagccccatttccacacaacacttaggtttaaaagctgcaaaaatggatttaatgaaataatgatggagtgatttgaagatttttcatgtctttcaggaaacacaaggtgctcttagtgaccacagagctagcagcctcccctgcatctcaactttatgtttccaaatatagtctagatgcttagtaagtgttaaaaaataatagtgcatcttgatgcattctttatggtgtaaaataacctgttaggtagcagggataatttttcttcagcattagatggctgtttatgtatgatatatttctctgtgtccctgggacctaatgatcgttgaatacaggtgaatagaatgttatacagtagatggaacatgattatcaaagtcaggagacctagactcagttgctttctagcaaggcagtcattaattacatgttacgtcttttatcagaacctcagtttggatctataaaataggattactcatttccaccttggaactgtttttatgtaaccatcaagtaagccggtaaatatagttatctgtgtagttaactagctgctaacaaaggaatccagggtggcctttaatatatgttcggaatatatttattcaacaaatgtttcttcaattgttttccaagttagatttataaaaaatgagagcctggcaggcaagcaggcaagttggtagcttgggatgggatccactacagcacagaagtgcagccagagacttgctcctaactccccacggattgctacaaatccttgctccaactcgcagcttggcaagggatcttgctatcagccttctctcatggaacccattgtgcatatgaatatttgattagcttattccattttcattttatactattagttctccttgtggggttagatcctatgcacacacacacacacacacacacacacacatcatttaagaataggaaactattttgcaatctatatgccctctgcttgtaattgttactgttcccaatccatttcctcctcattctttgtctctcatccaaatggttttcactttatgtgtaacaggagtgagcttattctgaactacattggttaggtcctttaaagcgtaagcacgagagaataaaatgaatggaatggcacagagcacagctcacatatttgttttttagttttaaattctcatttgctttttagttttacacatatttattacccgtatttctcatagatttgctttttggttttacattctctccttacttttgccttggttctcctgatgtgtgaaaatgctcctaaggccaccaatcacaggattgtgactccttccccaactttgtttacctacaataattgcaacagcatgatattgttcaatgttggcatatgcaaacagaaaacctaagatctggggagccaattctttgcagaaggtgcttcaacctatctaaaagcaaaaacattcaataatgtgtacatgctttgaggtgtgtgtaatatttgtgtgttcattatgttattctcatagtcacaaaactcctttcaggtaaatatttgttcccattgtatgcatgtagaaatcaatgtttagaggggttgttaaatagctagttaaaatcagaaccaagaatcaaattcattatttctgtcttaaacttctctttcaactattttaggctgcagtagtaagcatcatatgacttcttgtcatctctagtgtgaaatggttttccaaagatctgtgtgtgtgtgtgtgtgtgtgttttaaataggcattttacttttaaaaggaaggttcacagtcaaactgagcagaaaatacaagcaagttcccatatacccccatccccacaaatcccacaaatgcatattctttcccactatcaacatctctgacgagagtggcacattagttacaatcgataaacctacattgtcacataattgtcacccaaagtccatagtttacattagcattgactcttggtgttgtacatgttgtgggctttgatgagtgtgtagcatttatttcccgtcatagaatcatgcggaatactttcactgcccctaagaattatccttgctctgcctattattactttctcccccaaccccggtaacccctgaaatttttactggcttcatagttttgccttatcagaatgtcttatagttgggaccctacaatatgcagcctttccatattgccattttactgaataatatacattcaaggttcatccatgtcttctcatggcttggtaactcatttctttctaatgctggataatattttattatatagatgtccacagtttatttatccattcacctcctaaaggacatcttagttgtttccaagttttggcaattatgaataaagtcgctataaacatccacgtgctggtttctttgtagacatatattttcagctcatttgggtaaataccaaggaatgtgattgccggatcgtatggtaagagtatgtttagttttgtaaaaaactgccaaactgccttccaaagtatctgtaccattttgcggtcccacctgcaatgaatgcgtgttcctgttgctacaacattgtggccagaattttattgtcagtatcagtgttgtcagacttttggattttgcctgtggtagcaggcttatttgcttatttgccatctgtatatcttgtttggtgaggtgtctgttcaggtcttttgcccatttttaatggttgtttttcttactaagttttgagagttctttggatattttcaataataatagtcctttcttaaacgtgttgtttgcaaatactttctcccactctgtggcttgtcttctcataaacgcttgacaaagatgcatttttgacatgcaccctgcctcatctatagcatgtcttcaaataggcttaagcgactaacttgagggaagctgatttatcttggagaactcctaactcatttttctttcattcatttaataggcagcagacttggggatataaaaggaatattctgatgtttagttagtgcttaattattttgcattcttaagtcaagcttttgactgttattgcagtgcacttgcacaaacatgaacatttcaacatctgctgttagtgtgaccagaaagagagagaagagaaaggaaaagaagggagaaatgttgactcaatcctgtccttatgtgaaacaataaaaatattttaaaactttctctcagttatgcgacatagtgcttttctattttttcctaaactggaagctccctaaggggaaaggatgcatctcatagaatctcaaggtgctcagcaggtaatatgcatttgagcaatgtttcttgaattaaacttgctagccttatttatcctgaagtgatataacatcgttgggctgcttcaaactgcctttatcctgatgggttcaactggcacaaacagttattaagatttgggagagtcagaggtcccatagataccatggactttgctgcatctcagttcttccattgcatgcctttggaaatctttcctgctggtgaggttctgtgagggactgtggcctgatagaatttgtttcatttctgtttgtttttattctttagaaaggcagagtagaaaaaacagtttaatgagataacaaatagaggaaaatactttggacttactgtttaaatttaaagattgactttatggtagctattaatagttccaacatcttgttgaatacccaaagcttaattatgtaaagagcttcttatttcctctctcctgccccttttcttctccatccccttgcaaagcaggcacaaaaattaaagctatttagagatatgtgaatcagcatattgcctatatctaatttatctttgtgcaatgcacacattcgtgaatttctcaaagccatgtgactctccagaaatctttaaatatgtaaataatattataacgtcccttagtgaatagcagatgcaatgcattattccaggtgtctgagtaatgcgaagaaaagatcaaattccctgttgtactacctgtgtcacatgttacattaataaacacagtcagcttgcaagaatagtatgttatctgaatttaatgaacttctgaactgaatggaatgcatctaattgacaaactgtcatcaaagagaacagaagacactacaaagtccaaagggaaagaagaaacaagtggggagaaaaacaaacaaacaaacatgatgaactgtgggggctgggattaaaatcattggaaggcatctctgtgtgaatgtgagcctgtgcagtaacctgcacgtgtgttgatgcctggtggtctttccatgtgagacatcttggatctgattaaagggccttgtggtgtctggcatttacagctttgtatttcccttaattgcatatacagactcaagaaagggatgggggagtgtcacataaaagataatccacagcaaagatctcaagctgttaggtaaatgaaatgtttccacaggagggtttatttttgccttcaaaatctcctggtacctgataaattaaagataaaactctttcaaacaagtttttacttttcttttctccacctcccatgctgtcatattgagtgtcacgtacatcgctacttaaaactccaacgggtagagtggctattaaattcggtctgtatatacatgatatatattatgcatattttcagaacatatgctgtgttaccatcttctgacccaaagagaaaagctgcagtaaggattttttcaggactgtaattgggcaaatgaccttgtaacgcagtggtctccgacctttttggcaccaatgaccacttttctggaagacagtttttccacgaacccagggttggtggggtagggatggcttcagtatgaaactcttccacctcagattatcggcattagagtctcataaggggcatgcaaactaggtcccttacatgcgcagttcacaataaggttcgcacccctatgagaatctaatgccaccaccactgatctgacaggaggcggagctccggctgtaatgctggctcgcctgccactcacctgctaggaacaggccaaggaccactatcagtccatagcctggggattggggacacctgttacagaatttatactgttaaatgtcacttgatatgcacactaaacctattacaaaccacatattgtcacttgtcataattggacagagctgcaatgaggttttggttttaagtgccaactcacctctaagctttttcagatccttgagctaaaagtgtcctctttctgaaatcctattaccatttattgtatatctttaatgaaagttttagtcttttccttcatattaatgttattcacccatttggcttagcacccctcttagagataaagctctgtgaagatgtgtttcttactggttcatttcggcatgccgctaaatgtgtaaaacctagaagatatcccatagccttgtttgaataaataaagttacacatggtgtttcaagttcacctatttctttgactaccaaaagacttctggttttaataaaacaactgtgaagttcaagtcctgtgtattctaacactttgatttactcaatggcctgatagaaactgtttttaaaaattatatttacccttagcattttcctgagtattgtctttagctattggtggggaagatggatatatgtgtatgtgtgtgtgtgtgtctgtgtgtgtgtgtgtgtgtggagagagagagaagagatacatggacccattgccacaatcttttaattatgtgaaacaaaaaatatttaaataacgttgaggttatccatatcttctgtattatattctgtgttactgatttttttggatcaaatagtgatttttcatgagctaggtataaaaatattaccagggactaaaattaggggaaactgggagtaacttagagtgtagccagttgtttttctactggtgctaccggcattgaaagcaagagagttcctccctgtgtggggatggcctgtacatggcaggacctgagtgtgccaggtctccagcctttacactttggtagcatcttccccacacacccagtgtagtacgccctctagagggatccatttcttcagtgaccacgtctttggagagccactgtctagatttttagtgcacaaaaatggagtgtgattaagggttttctgaggatggtgtattgttttatgttttctgttgctccactcaaattcaaattttgctgttagacttatcattataatgaaattgaatgttggtaaatatttttgtaaagtatatgccccttttctgtgttgaatgggctacaggcattcaataccccgtaatacccaaaatatcattaatttccagaaaatataaaattgtcacaaaatctaaaaactggaatattaggaaaaaggaaagaatggtttccataaatcactttgtttaacatagtttctatgtgtttgtctgagtagttgttttattagaaaattgtaatttcctctctaaacagagcaaacatattccttcttcttcttcttcttttttttttttttttgagatggagttttgctcttgttgcccaggctggagtgcagtggtacaatctcggctcactgcaacctccaccttccagttttaagcgattctcctgcctcagcctcccgaggagctgggattacaggcacctgtcaccacaccaggctaatttttgtattttttttagtagagttggggtttcaccatgctggccaggctggtctcaaactcctgacctcgtgatctgcctgcctcggcctcccaaagtgctgggattacaggcatgagccacctcgcccggccagctaacatactcttttgttcctaaatacagttttaaaagcacatgtcttgagactaacttgtcctttcctttgtaacatcagtcagttttgttaacaaagtaagtgaggaactataaagtttgcattttaggaaaattttgcatttagtatataattttatcttagcctgtgctttatctggcaggatctgatccatcctataattctacaattagtgttttggtcagaaatgcagtcatttacatttatccctttgacattttgccattcttattcatttatccagtcattcaatttcagaatactaactttgccagatactaatatcaaggactggccaattcattcatgagtagatgaataacataagtgtcctgactcaaggagcttgtaaactaagaattgtaatgttataaactatttatatttctctagtattttacaaattaacaagcaaaattgtgtgattctatttgtagtcaagtgacctcagaagctattcagtcttcaccatttcctaacttatgacttgatctcattctagccagtgacgctctatagtattatatttattatgtcatccttaacggtgtggaagttgaaggaccagaaagattcacacagacttgtctttgttcacaggagtagacccatgcctctagatttaaaaggttcatcaaggcagtataacttagtagaaagaataagaaactgtaagtctggggtgggatctggcctcagtaattctctggctgtgtaaacttaggtaagatgcttaattttaaacacagtatatccttctttgggaaatagaatataccttacggatttctttataacaattatttttcaacaggaaagaaggaaagagaaatgcttgcatggagccatcatttattcaacagtcactcatcaaatacttgttgaatgcttactcggtgccaatcacttgtccacacactggaagtcaggagtaaatacaatcataaaaattcctgccctctgggtgcttacatttctggttgtgttatgctgcagggagaaagaggagattttcaaaggtaatagtacctaataccatctgaaatcctaaaatttctgccttactgtcttccacctaccatccccattggggaaaccttaccttagaggaggccactatatagtggatatataatagtgtttgtattttatatcttttatcactgttttctgcacacagtaaaacagtgataaaagttatcactttcttaagattttgaggttgctgtacattctcatttgtgaacaaaaactttgctctgattacgtaggattcatttaaaatccatggaatcttttgacactgaagttagaagttcattttatcaacaagtgaaatagtctcaggcacaaggtggaaggatgtgagtcctaaaatcttcggtaggagttggctgggcgcaatggctcacgcctgtaatcccagcactttgggaggctgaggcgggcagatcaccaggtcaggagatagagaccatcctggctaacacggtgaaacctcatctccactaaaaatacaaaaaattagccgggcgtggtggtgggcgcctgtagtcccagctacttgggaggctgaggcaggagaatggcgtgaaccccagaggtggagcttgcagtgagccgagatcacaccactgcactccagcctgggtgacagagcgatactctgtctcaaaaaaaaaaaacatctttggtagcagttttacatagattcccttttgacagctcccaccccagcaactctgtaccatagttattggtaagcacatcttccagatgtgggaactgtggcttagaaatgctatgaagccagttagtagaagagctgaaattagaacttggtattctcaacctcaccatctagtgtgctaatcttttttgtttttgtttttcttcctgggacagataccatttgtgacctgttgagtgagactgatttagtccactgtgttaacaggaaagttgttatagtttttttttttcttccgtattgtttttaatggcaatgtaaaacatgtgaatctgaaaagagaggttctgagaaatttgtgcagctcctttttccaaataaaagatagatttctcttgatgaagccttgatggttggaaattaagacaagaactgaaagcaaaacagcctactcaaggttagacagtgactcgagtcattccatgcacttaaacaatatttaggatgaccctatgtaaactcacattatcacttaaaagccagtataaaaatactacccatctgctgtgctagtcctgctgttgcttgccacatttctctgacaagctgttacctcagtatatagagagagtatacattttggaatccggagtttaagtttgaaaaaaaaaaatggtatctggtacatatggactagattctgttcttccaaatgtagatttgtaacctcatttattcttaaagatgatgtgttaagttagctttttttcttgactctgaagattgaagctcttataattttatgcctggacatgaacaatgtacaataggaaatcatttagtttacactcgccatatgatatgcaaagtgggtgttgggaggtgtttatatcaaacaccataactaagttctaaaccgctctctggaagctatgtaacttttcaggtattaaaggtttggaagatttgtaggtgcagtatgtataattgcttccatacaagtaattttttagtgccaaaaaactctaattccataatttccagtgccattataacagccgagatgtaatcttccttcttaataggtatttgagcagaagaggcaagattgaaagttagatcctcaggcttctctgatgcatcaatctgcggataaagcctttagctaggaattacaatctggaacagacgtgcaagatcactgagtcatttgctgtttttccgtgggacaattacttattctttttctgcagatttcctaggaaatactccaaagtaaaaaatatcaggagcagcagtatgtgatcttccttgctgcttattgttcatactctttatcgcttctcagctttttggctaagatcaagtgtattgtttatactgtctccacgattttcctggaaatcctttttggtgaatataaccttgtgcattacttgaaaatgggcattttaatcattttttcattccactaatatttattgaatgatcattatttgtaagatcttaggagacctgtcaaagacaagcacgggctcatcaaaatcttaaacttgtgtatagagtactaaagaaggagcatgtgaacatatgattttcagaaaattgagaagggaagtgagtggggagccctttgagactggacagaaacaagaggaccatgacactgaagaggacatttttaatttcatgttcaccctgagattggtaatcaagagtcttatttactcagagcaagccgcataaatcaaaaccacaatgagataacatctcacaccagttagatcattaaaaagtcagggccgggcatgatggctcacacctgtaatcccagcactttgggaggtcgaggcgggcggatcacgaagtcaggagatcgagaccatcctgactaacatggtgaaaccccgtctctactaaaaatacaaaaaattagctgggcgtggtggcgggcacctgtagtccgagctactcgggaggctgaagcaggagaatggtgtgaacctgggaggcggagcttgcagtgagccgagatcgcaccactgcactccagcctgggtgacagagcaagactccatctcaaaaaaataaaaaataaaagtcaggaaacaacaggtgatgcaggtgatggagatgatgtggagaaatagaaacaattttatactgttggtgggagttcaaccattgtggaagacagtgtggcaattcctcaaggatctagaactagaaataccatttggcccagccatcccattactgggtatacccaaaggattataaatcatgctactataaagacacatgcagacgtatgtttactgcagcactcttcacaatagcaaagacttggaaccaacccaaatgtccatcaatgatagactggattaagaaaatgtggcaaatatacaccgtggaatactaagcagccataaaaaaggatgagttcatgtcctttgtagcgacatggatgaagctggaaaccatcattctgagcaaactatcactaggacagaaaaccaaacaccacatgttctcactcataggtgggaattgaacaatgagaacacttggacacagggtgaggaacttcacacaccagggcctgttgggggttggggagaggagggagggatagcattaggagaaatacctaatgtagctgacgagttaatgggtgcagcacaccagcatggcacatgtatacatatgtaacaaacctgcatgttgtgcatatgtatcctagaacgtaaagtataataataaaaaaataaattaattagttaattaaaatttaaaaagtcacactattaaagttagaagacatgccctgaatcttccagtcaaaattccttgtttacagatgggagaaagagtgaggaagggttttgccaatggtcacatagatgtcaaatatcatttactgagaaaatcagcataagaacccaggtctctctctttttttttttttgtttttttatcactcaagccaatagtttttccacccttttagttctgttatttgtcttctccactgttattcaaggctatctcaggccagaagcagaggtttgaactcttttcagatgagagcatttttgagactgggacctcatgttgaactaaactcacctccacgttggcacgcacgttacttcctcttccactgtataattttgccgttggattaaactcatgtggttggtgctaaggctttgaccacaggcacatttgaagattatacttatttctggatacaacctcctttgcctccaaactgaaaggttggaaggatgacgggaacaaactcaagtcaagggattccaaatggtcacatcttatgaccacaggctttatatttggagcgctaccatgattaatgtgtcctcgttgccatcctaagacttccatcattttcttccattgtctttctgacttcagctccgttgctacttctgggcagttataggtttctaacccaatagggcaatttcagtttcccccgcgttttctacataagttgtcctttctccacatatttgtttatgcagtttaagtcttgccagattgttctctctacgttctaaaatctttccaattttgaaagtcttagatcaagtactacgcagctgaaaatggctctgcctcttttatggcatttaatatctaccttggattatagttattataacgaccatagatactaaaactttgaaaagaataacaatttgaattcctttgtcctatccccataggacctagcattgcctctttcaattaataaatgtgtaaggaataaattattttggcatattatcccttgtcttttaaaagtttcacaggagtccctttgcaatcaagttaaaggctataaaaatttaacatctagttgtgttggcagagttgtcagcatttacttcagtttatcaaacttcaatatttatttaaattgaaaccaatcagccatttttttctatgcaaatcacaaatctcatttattaatgccttcccctccccctttcccttactacatcaataggaagattacatcttgacatgataaaaggagacaagctttcgttaatgttaagaatctgctccatggccccctttgcccagaaagtcatgaattctgataatcaaggggcagttgcctatgttatttttttttaagtttctagttaattatttgctcttccttatttgcattttgagatgtaacagtagagcagtttacccattctctcctgaaaactatgagtctgtttcagacaaattactatactaggcacccaccctcagtggaggtgcaggagactctaggcccggaatgggtgaaataccagaagttgcatttgaatataatattgactaattagtcagccagaaatgagagctctaaacatgctctttttgtgtcatttactgcatttgtggagcatctaattataaagaaaataagtattcttcattggttgctagtaaagctgccactgaagggcaaaaagacatatagcaatcattgtttaaatagaagcgcttgaaaattttccattaattttcgtgtttgcattttgaatgctttcttgctcacacttgaggtatcaaactgaacaagtctgaactgactgcgtaagaatttaagcaagaactgggaggggtagaaatgaggaagctatttgcattcctggaagacaaaactcacgtttataatctttcttgatactaaggcagtttgtttcccaaatgctatttatggtgagctttttgtcttcaaatgtttgttataagactcttttttttttttaatcatccagtgcagaagttcatgaaagaaagtgaaagtgcacccatacccccattcattttccagagcttaccctgtttggtacattatcttgttggctcatgttttgcttggttttgtttatgcaactttttcttattaatttgttgttgtcgttggatggagttagggagggttaaaggactggagtaaaaatgctatttatctttaccccttcttcacttacagtgtgtgtacgttgatggagggggtggtggggatagagggtgattttacctgctccatttttgtttctatttgctgctaccagcttgcttcttaaccctgggcagaggctgccctgcaggcaggagcagaataagctgtctgtgcccttcctcttcctatacctttgaagattggtgcctttcactgttttccaatcgcttgttctttccataagctcgttcccttctctccactgctttgacaacaccttttagagttgctcctggagctgctgccaagacaatagtatgttttctcttttaaaggtctaaaccctgggaggagaggaactggaggaattgagtcaatataatatacgaatcactttatattttactatctataatttagtttttgacttccatttctaaggaaaaaattgttttcttttattgttttttttttttctgtttccattcagcactcgtgtactgagaatccccaagctatattaagtcccatttgggccattaatgtgtgtgcaacatggtctgtctgttccagtagagaaaaaggcatataaataactttcttatcactggttatatgctttgaaggagtacaaattaaacaacctgtggaagttcaagtaaaagaaagcttatttccagtcacgagaagttaaatgtgagctgggcagattcataatagagaagtaccgtttttttgtttgtttgtttgtttttaactctgagggccctgtgagcttggtcaatttacatcatctcatgaatgacatagggccctatatgtggaaacaaataacaacaacaacaaaccactgtagagtcatatcaaagaaaaatgaaggtggtattcatccacatcaatattaagataaattattaaatatttataaaactctttgacagtgtacagcctctataattaatcaatgtagcactttctcaatacttccccattttaattagtaccaacatcaatcataattaggctcatgctttggtctctctgagacttttaaaacattatgggtagggggcatttttcaggattcaggtatcagctaagagttcatttagccagtagatcgtgaccattcttcctctccctgaagctatgattctggatactgtggctcttcctgctcctccagacatagagaaaatggacaagtttctccttccccattttgagtgcatgatgtgaaaacttagcttgtccagccaaactggaggaaggagaggcgggacttattggagtaactgaaaagagaaaaattggaatatgagcagtaccaatactcagtctcttaaggaagggtagagtccctttctttctgtctctgtaatttttttcttttttgtttttttttttttcaaagaagattgcataagattctgtctctctaggagatgactgatgaaatataccccctgggtcatttgcatcttactcctttgtagtgtagggaagaacattccaaacccattataagcacttactgttgttgggcatgtcataacaaacacaatacctttctggaatatactgctgagcccttggctttttgctgaatttgcctaaaagcccttctgcctattgagtggccacattctgaactagttatacttggttaagttttcacacagtacactctgggatactagggttgcaacaatttaaaaaagaacatagatggaagctttatatctcaaaagctcctacctttgacttccctgacaatttttccttctcctgctcttcaactctatgtttcccaactttgtttttgtaaacacgaaaagtaaattttttaccattttgtgcctaattcctcttctttctctcttctctttttactcatcacaggaatgtcttagctttccttccttctccaatctgccttgggtatagagtcacgcctttaaatcttttagcataccacaatgtaacttacataaggaaatgtttaatttgggaacctcaattggttttgttaacactgctgcaccgaagctctagctgaattcacataatctcatgattttagtaaaggtaacaaaggaaaacgattatgtaagtacctacttttcaacaaacattgggctgggtttcttctttacattttctcatttaatcttcataataaccctgctagataaggtttaccatctcattttgcaatgtggaatctggagcccagagatattaaataccttgtacgagagtaggtgtgcaaagctaaactttgaacctaggcatctctgacttcaaagtctatgctttttccacctcatagaaagaccatccagaagatcaagtgttggaaccttccgaggctgtgacatatttattacttcaaagtttattatcacaggacatgcatgctgctttagcaactagaagtgtgtgaatgaatattactattgtgttgcataagtccttggcaatattactttttaggtgccattctaatcctgccctgtttggaataattgtgattacgagggcataggagtaattcagaaattttttgaagaaatttctcccacagcattagccttagttatgagtataatacaaaagaagaggaccagccctgctggaaggtaaatgaaaagatggaggaattgaacgattacataacagctgttcagacttgtggtactgattagagtcatttgtagagatgaagcagtgtgtcaagccagtgtgggctagggtatactgggaagttctcacagacagaatgaagtgggttgcggcaagccctgaggtatggcaaaatctggacagctagcctggatcttcatttttcattagttggcttccttaactgctcaacaagtagaccaaacaaacaaaccacgcatacacacaaagcaaagaagtaaataaagaatggtggggctaagactgtgaatagctcctagcaaattagagaaatagcttcaagtatatgccttctggatgatgtatgtttgtatatgaaggacaacacatcaaggggtgttggtagtaatctgtgctaagcttagaagccagtatatcattgttctagttctatttctactgtcgagtggctttatagccttagacaagtcatgtaaccgttcaggccccaaatgtccttctggaattacagggattgaactggatgaataaaaagttctatttcaactccaacatttaataattctaaagttcttagtgagctctgattgctcatttgcattacataggcatatattaaccattttaatatgtatcagaaaaggtatgttctttttcctcagaaatgttgaagcctgactttgttatagaaagcacccaggaatcatgtcttcagagttcctaatttttagtgttttcttgtactgccccgactgctgcaatcctctctcttacattggaattctgttttaagttttggtgattggaatcctctttttgatttaagagaaagaatcctaggggtgaaagattactatactggaaatgaaagattactagtctctaaatgagaattggctttggtctgtaatagataaaaagatttttaagggaaaaatattagaaaagtgaaaacgtttttaaaaaaaataggtagcagtcaccaccgtattctggtggaatcgaattcttgaagattagatttgtgtattcatggaataatctagacaaaatcctgccttgcacatagtggggagatacactaaaatactgaaacagctacattgtattcaggtgaagctacatagatgtaaataaagggcagccagcgggtacaagctgtcaattaagtgttttcaatagtctactccgtgtcgccacatcttaggtaatttagataggtagaagacaggtcattagcactgaagttgagaacacatttgaactccagaatgggattaatgcatctccaaaaaacgtgtattttctaaccctgtgcaaaaattatatttgaaaagattaaaacaaacaacagttttcttcgttctttgttatatgtctttgtacttgaaaaaggtaaaattctgcattacgttttaaacaaattgtgccagggtaaagggtaaaatctccatcaacatctaaaggtctttcttgttcagaaaatgaaggcccctctcctgcattaaagaccaatgtggccttatagatccttatacagagggaacaaaatgacattagacagactctaaggtgccctcaattattcccacgtggtggtattcatgcctttgtgtaattgcctcccaatgagtgtgggagggacctatgatttctagccaatagaaacagcaaaggtcacatgtagtctttgatgacttgtgtgtgattgtgttatataagactgtaacatttgttctatgaggggactttcacccttgtaggctttaaagaaacaggctgccatgttgtcagctgccacctggagaggtccatgtggtaaagagtgagggcacctagtagctgacaagaaactgaagccatcagtttagcagcctgcaaggaaccgactgttgacgacaatcatgcaaacttgaaagcagatccttccccagtcaatcctcagttgagactgccaccccagcctaactttgcttgtagacaatgagaccctgaggcagaggacccatctaaaccatacctgcacttgtgacccacagaaactgtgggataataaatgtatgttgttttactctgccaagtctttattgttttatagatagctaatacaattatgttacttttagaatctaacattttcttcacctttcgttttctacataatagttactaagtgaatgtgacttgttatccccatcctcaaaatcattaagggtcttttatttaatatttgatttatctgtggctttgtgaaattcataaatctgctcctcagtttctggtatctcttcaggagagatgccctcttactctactgtatatggaagttgaataagattgaaactgatagagaaatacttgttgaatcaagttgaattacatgaaatgggcttctttaaaagctgttattaaatcttcctgtggctgtcctagagatgatataacagaacttctgctgggaaatgggagagggggagggaagcgttccatgagctgctctgtcatttgcatgccagtgaaattaagtttgaatttacattaagaggagttttgaaatttaggatctatcttaccaaatcacaattcagcctaacaaatgttatggaagtacaacaggagcccggactgtccattgtcatctaaatgatggatgtgtttaaggtgtttacatcagtgctgtttctcccacctaccctaggtctgggtggttgcctgggattgtttactcaaagacagtagcttgacaatttggaaatgacagaggacgctgatacttgaaatcaaactgtagccctggaatagcccaaacatggtcccagggtggtcttgcttctgacttatgtggaaacggccaaatcttcaactacattctgtagcttttctttattcacccagccaactggaagatgagtacctatcttggaaatttcccagaagcagcaattcatactttccttataactcttaacacattgctttatagtttctgttccaatgccagcaaagcccctctttgaagactcagtttccgtcatgctgctctcttacaacacgctttcctcaattctgaatgaatgagcagatgaggatgctgaaatgttagcataacaaaccaaagtcttcttctgttgcgggacattacatttaatgtagctttatacagctcagatttatttctataggttaagcattttgttaaactattcctaaaacacttctgaatgggtcaccagaaagaatatggagcaatcaattctactgtaacctagccaggcaaatattgactatttcctgataccagcatatgttgtatatttctgccttactctagtgagcagaaaatctgtgaaggtttttaggaattgcctaaagacacgcagttctcaaatggcaggaaggagagtaaatcctagtctttctgattccaaactttatattttttccattaaatgaatacagcatacttacatacatacataagtaatacatacattcatacatgtattcagctgtgaacattttttgggcaccctcaatggcccattcgctgtgttggatgtgatgagggatatgtagatgaataagacctagatcttgcccttatagggaaaaataagatttaaataggttaaatcctagtcttgtgggaagatagaaaagatgcacaaaacgaaagccagactcaaatgagtaaagttagattataagtctgcagatgtaggtaggtaacctgagctttccaagaactgtctcctcacttgaagaatggcagttaataatctctgctttatagactggttgagtggattgaatgagaacacatgggaagatgctggcatttaataggcaacccataatagaaatgttaacatgtgctctggggtatcttcagaggtattgggagaggagtccctgcctaaggaagaagcagtgctgggcagaggaaggaatgtggacttggattggaactcagtggatctggtctccagtcacccaacaagccatgtgactgtggaccaactactaactgcataggcaccttggattccacaattgtaaaatggacatcactggaaagccttcctcatgaagtgattagaacagatgcagataatagcacaggtgtggttgaaaattgtgaacattcatggaaaagttcacttgttttttttttatttgtttttgttttactgtcaagaatataataggagccactcaatttatgactctgtcctttcacttattattaaaattatggtattccttttgccactcctgtggacaacatagccaagcaaatgagcattttagtctttctcgtcgtcctgtcttagtttgccaaaactttgaatactctgtgtgtgtgtgtgtgtgtgtgtgtgtgtgtgtgtgtgtgtgtgcgcgcgcgcatgtttagttgctgttgaaaatatttgaccactatgaggaactggtaaatttgcctgtgctcaggaatacattacatggatgctctggttagtcactttgtactttacatctgacttttcctccatcagagacaaaattaataataaacaatttttaagattttggataaaaaccttattaaaatgcatggcatatttttcttttttcttatggggctattctaagcatttgaaaccttttgatgactcagggtcatcaccatgaccatctattgttatgctctgctgaaactcagtaattttttcctcctatccccccaggctgtcagcggccatctctgctgtcactgtgctgcctttcacagtctttcccactaccttctaaagttcattggttttaatctcctctggtatgaggaagaaacagcaaaattgtcattagaatcattggtgaataggagtcaacaaacattcactagtggcccaaaggagcactcatcagaggaaaaaatgttgttttattttgaaaaattgctattttataaacccagagctgctactcccccttcttttcttctccgttctctttcttcatctttttctttcctttccaaccttcatgaaaactggaaatatggactatgacttcatatgctcttacttaccctctgctgggattttgttctgaaattgtaacaattagaggagtgtttctaaattggatcgcttcagattgtctcagttctctgtgactttaagaacaagctgatttgaagccacatactgttggcagctttcatccatttatttggactatcaagcaagaatgctcacaatctttcatatgaaagaagacatctttatttccagttcacactcttcataataagaagggtatttgaaataaagccaaaaagcataacttacttctctaacttcatatttcagatgcctgcaatagtgggagaacatttttttactaccccaccttaccctcaaatcagtagcagaaaataacagtgatgcattcagacagcaaaaagagaaaataataattttattaagtttacaggaaaggtctcagctttcttaaaagcctatctttaggaagtaagtaactggagctgcacacccaacagaggaagatgactttacttatcatttacttagaaattatctttgaaaggatcattgtgctgttgttagcaaaaaggagcttctgtaaatgtcacctcaaactttgaaatctgggaaagtctcattatgaaacgcaagttttatctttcatactcagcgctggagcactgagtatccttgcattcatgaagactttctggtacagagtaaacggagctgggagcataagtgagaatgcagctccagctgacagacccccagctctatcttcccaggtgcatttcctttttttttttttttttttgtgagacagagtctcgccctgtcaccaggctggagtgcagtggcatgatctctgcttactgcaatcaccgcctcctgggttcaagtgattctcctgcctcagcctctcgagtagctgggactacaggtgcacaccaccatgcccagctacttttgtatttttagtagggatggggtttcaccatgttggccaggatggtctcgatctcttgacctcgtgatccacccaccttggcctcccagagtgttgggattacaggcgtgagccaccgcacccggccgcatttcccttttgtacactaggagctaccgagtaccagaagtctttgttaggatgcacagttctttgctcactctgcctgggacagtggctcaacatctccagtcccctttgagttacctccagaaggttcaggaagagcctttccctccaaaatgttcatagcatttgatctaccttctctaagataagcagcttttgtcacattgtacctagggtaaagatttgtaatgccttaactctatgccatctgtatgcttcctgcggacaggatatgcttctaatttatcagattcccttaagaaactacaccatgatgcacttctcaaagtatgctcttaactaatacttatgggaggaaaaaaggaaggagaaggaaaaggagggaggaaggaaatcgtgtaattgcagaaagtttatgtctgggacccttgtgtaataatgttaaataatactttgacttttacgccatttttctatatacaaaattctttcacatctattttcaccactatcctgatattgtttgcatgatgtgtagtatgtatgtttttaatgtgtgtgcatattgtttgtctctcacacatacagcagccccaacactgacaaatccaaattctatgagtacagggagtttgttgtgttcactgctgtatccccagcaccttgaacagcacctttcaaggaggaagaacctaattcatgtttgttagaagaatgaatgacaatattgtcttatttgatcttcaccataatcccgtgaagtgaataccgtattcatactgtatcctcgtttttttgcagatggcaaaactgaggccttgagacctgctcaggtttgcatagctagtttttggccatggcaagatttgaattcaggtttttctatttccttattctctcctttttgtcttctgggaatttgctatattaatagcaaagcaagaaatgtcacacaaagaaaaattgtttccaattttaaattcatgatgcatatgcaagaaattactgacttttcaatccaatggtaacacagattgtgtgatttttaggaggaagagcctttcttttccatctcttgcgtttattagcatatgtgtcagtgcacacacatctacaccgtgcagctctcaccttgtacttttccagtctgaattcgttttgtaggctgtccctgccctgactatcccaggtgcctatcagggctgtgtcttggtcaggctaaggccaagcaacaggcaccagcatttgttatggttaccttggcaagtgaatggggtttgagggaagctggagagcaggcatttcaggagtagaactaggccagtctgtttttgtaaaaagttgatattcaccctaattgtagctcatgttggcaagcggagtaaacacccatgcaaattactaagttgtactgaatgtccaaggatgtcaataatcatcttgaaatccaaataaatatattttttactgaaacggaagccaggcaccacatgcagtttctctctgtcactggagacagatttggcacatatgcatgagacagagaagggcaactcttcaggccctaatgcacacaggaaactagggatgtgtatatcatacttggcagcaaaatagaggtggggcagccatcactttctgttctcaagcacctctcttttttcctatattttaaaacaggatgaccacaaagaagaataaggtatacagtagcataggatcctaaattaaagcatgagggaaagctagcattagtttttcatctaaagtccatttgggtaggaatgagtcagtgcaaaactgtacaaaggtgatcttaagtcacatgttatgttaccgactctgtggcaatggctgtgagtagtccaggaactctccaaggcctatttttaaattcacttagaccaagcataatgaggtaaagggatgtctatacacattctcaagtttagttctctgaccgtgagtcagactgtgggccatggacctgggcgtctcagtggtagcaggactcattttttccccttttctttctcataaatgacttaggagacacattggagaaccctatgtgctccttttactggaattatcttttaaggaagtactgatttcacctcctgtacatggtttgctgagatggcctattggggtttcccaccagtccacaactggaagtttctatttgcacattttgactgctagttctatatttagtcaaaagcctgccttttgcctggtttcttagggaaatagtctgtaggagttgctgtgtccatttgccttgttcacttgggtatttatttgactgtataccctgattatttcctaaattaacaaaaaggcacagggccccaaatgaaggaagaccccttgtaatttgttaaaaaataagtttatgaaaatgtgtcgtcaggaaatcagagttgtgttgcggggtggggagcatgatatacatttgtgtttgtatgtttctaattgtctacagatttatggcctactgtaacaaagccattgtaagtgtacagtgggagggtcaagaaaccttattctatggattcaaacacattatgcatacaatttacacgtaggcacaaaaatatcccttcaaagaccctccaataagctatggtatagttgaggaaacactagacttgaagtcgggaaaccggagtgttgtcattttaatctcaggctatatctttacatgaacaagagaactttgtgttatttttcatattcgaactctttgtgctgaagattctgcagtcaaactgcaagacacatacgcattggctgatcagaaatgacataaccattcttactgcactgagttgatattcagtcaataaacagtctaatctcggttaaatgtttgcatatttttagacttttaaaaatttgaaatcagcctctcaagttccattagacagttttatcacggacacatcaagttccatgtacaacaggctgagaaccattaagctacaaaatttctaaaattttctccaggttctcagttgctaaattctctcttgaacatttttggggataaaaaactggcagagaaaaagaagaaagtacacctttttacattatgaaacacctatgttcaccttatccatggagttatgccagtgacctaatgcctattaagttcttccatgttccaaaggtctttctgtacttgaaaactcataggtgagtcaggtccttcactgatagcttatagctaaaaaccacttgggagaggggctgtccaggtcttatgtcaaaactttgtcccatacgctgttagtgttagaaatggagccgtcagcaaatagaatctgttgtttcatttaattacttttcaatatgccattaccagaaatttttatgtaaatacatattttattccctgaggcttgtcaatctgagaccaaaattatacaacactgaaaaaaaaaaaaacaaaattttctttttactagttctctccctgtgttactgtgtcatctctcatgcatggtataggatgatgatggtgctcaaacttagccaaagactcttttgttggtattcaattggcagaattaatgaaacaaatattttaagatccctgaatatgtgctaaaagcatataactacactactggctagtcagtaattggtgcctcagaagagttaggtatttattcatttaccaaatacttatatgtcaagcactgttccatgtgttttcttaacccatgtcattgttaaaacaaccctttgaaatgtgggtactgtgattatttccattttgcattgaggaagctgaggcacagagaaagtaaggaacctgcccaaggtcatactatcaattgtagtggtgcaagacagtgggctctgaagtatgttctctctatgacgacactgtgctctgagggagtgagagaaggaggacattgtttggggcccagtgaattaatgaacaagatatctgactaggatctgaagactagcagaattgaccctacagagaatgtttgaccctacagagaatggctggctgttggtgttcacagccgtgagcatagtgtggtccacagcctcggtgtggaaaatggtctctgtggttgaattgagagaagagcaaatgaactggtctggaatagggtgtacacgtaagtagaagataagattgaaaacaaatttagtgccaaaatctgagggaccttgagccccatgccaaagagtctgtataccttatctaatttgtttaatggggccactaggcaattacgggtccgggacccgcatggcaagaatgccttccatccacagcagcccttgatgtgaggtcagaaagctaactgctaaacttgcagtcctgagggaacaccctcaaatggataaacccagctaagcaagctggaccatttccttgggaattattcacctctcaatcaaagaaggaaacttcccaaattcaatccatttgccttaacgtggtgtcccattaccacgaatactgagttgtatacattcttccctagctcccttgaacaagcttctctactacttttcttaaaaaaaaaattacccatttatgacttatttattatttatccccttcctataagggaatgtccactctttgagatcctcattcttcctccatcatgatgatgtgatgatgtaatgatgtagtcaaggcgcttccctggcctaatgtgtatgagggcaggctttgaagtttgacagtcttaaagctagagtggtgtcatgcattgctcacctctctaatcccagatttcctcctctgtataatgggataaatacctttcctatgaacattttcagatttttaaatattaataattcatatgaaatactcagcccagagctctgtacaaaatatattactcaataaatgtagccattgatattattaataatattattaaatattgagaatgaattctaccaaagtgcatggcacttccagtggctgattctgttttatgtagccacaggcctttaccaaaggcaatggcaataaagagagggcacagcaagatctatactcctttaaactaaggtaacccacttcagttagtccccacagcttctcttgcaactcttaccctattagctgtttctggggagaaatttaatgggcatagatactgggtggatagaccataccccagtgatactccagagagtgaaaaagagaagttaacacagggcgtgacttcctatgtttaacttgcagttcttatcttacgttgcccatcagaattatctgtggcatattctaaccatattcttcctaggcctcacccctagagatactgaattaattgttcttgtgggtagagtcactgttatgctttaagcttcccaagtgattctgatgggcagccaagactaagaatctatgatttagatagaagatgggaagccgagggaggccatgggaaagctctgatggtgagtatgggaagaatcaacataaaacaagcactcaacaagtgtgcatctagttgaagccttgcttctcctgcatttgttatctcagtgtgctatttaaaagcagcacaaaaaacaaggagtgaagaccttgatatcaaggatgtgaaagctacttctaatcttcaaacagatattaggcaggggctttaagacttcaacttgagagaaaagctaaggcacctggtatgtgtgtgctcaagtgaaatatttgtgctgactgagggcttcaatgtcaggctgtctgaaaggacacaatatcaacagctttgctgtgcttgtgtatgagtctttaaatgaatatatctggttatagcttatctcttttctccatgctccctcatttccaatttccaggtaatggagatcatctagttcggtttcagctgctttattttgcagatgagcaaacccagtgatgcctgtgatctagatggaggcagatttcctctctcccccaccctggtataccatagtctgttctaatgctgggatcaaggatgaaagtgctaatttgggagtgtcccccactttcttactagctgatatggtttggctttgtccctacccaaacctcatcttgaattgtgatccccacatgtcaagggagggaggtgattggatcgtgggggcccttcccccatgctgttctcttcatagtgagggagttcttatgagatctgagatttttaaggcagttttccttgctcttgctcgcttctccctctgctgccaccttgtgaagaaggtgcctgcttccccttctgccatgattttaagtttcctgaggcctcctctgccatgcggaactgtgagtcagttaaacctctttagaaattacccattctcagggaagttttttatagcagtgtgaaaatggagtaattcaatgaccctttcttactgactcattggtctgatttcttgaccaaagctctgaatattcccatgtcatcctgtctaaccagctgtcttatactctttttttttttttttttgagatgaagtctcgctctgtcgcccaggctggggtgcagtggcacgatctcggctcactgcaacctccacctcccgggttcatgccattctcctgcctcagcctcccgagtagctgggactacaggcgcccatcaccatgcctggctaatttttttgtatttttagtagagacggggtttcaccacgttatcttattcttaacagtgtctgaggtatttttttgaaacacaattcttaccttaactgccccaggcaccacggcagaagaaccatgaccttgctgagaggcactgcatgccaaatgagacttagtttttccaaagtacttgggagaagaaaaacaataatctatatgatgggcttttggcctaaacccatatcctttagatgacggaatttggcacagctcatattctggtttaaagaaaaatgttttgttatgatgtcatttgcctaattaatagcaaaagaggattgaattttccctatgcaatgtcatctagcctttgagattttagagttaatgactcaaatcaattgtcctgtcttctgtgaaaccttcctgatgccttcagttggataaatctacccttggtgttcataaggcattatattgatgcctctgatgttatgcagatatatcccttcttggctttgtttgcccattcaatgaacatttgttgaacaccacctatatgccaagatagttggaagatggaagtgtggtacacagaggatgtggaagggaatcacagaagatgagactatgaaggcaggcccttcaaggactttctaagtagtactcaggagtttgacaaagaggagctagaagaggtttgtgaagtcagatgagtaatataattaggtttgtattttatgaagggcaacatctaaatatggcttgtctattcagcaagcacttattaagtgccttttgcatggtagacaacatgcttgatgctgaagatacaagaaaaaatttaaaatggtccttgccctcaaggagctcacagtctattgagttacctttctgactttcccactagattgtgagctcctggagggcaggcactttcgttcatctgaaaaagagcttaaatttcagtgttaatcctagattacaatcccgcctctattattttaactttgttcacatctgttaactgctctgaaaatcagagctaatactgcctacctcatcagggaaagattaaacgagaaaagaatgagatgtgattgacacagcaggagctctgtgtatgctatttcctcctctatctctgtgcctggtacatggtaaacattcaggacacttctgctgcctgcttggctggagagcctgtctatgcagcctcagtgttgggaggatttgagcctggggtcggcctggcacccagctatggtagttagcaaatctatcctcagctcagtcagtgatcaaatcactggctctaggctgtaaactaacagggccagaattgggttctggactctgaagcccaggcatgcatattgcaaaagtcagaatcgaagtcataggaaaatgatgaaatttcctttctggccagaatgctattatttcaccaagggcaacaaatcttcttggcaggaaaagttgacttgcttgtgctttgtgtaatcaattgtatttgcaagtgatggagtccttctcacagtggcttagaggaggtgttaaccactattctactctctacttccatgagatcaacttttttagattccacacttgagtgagatcatgcaatatttatctttctgtgcctggcttatttcactcaacataatgtcctccaggtttgtttgacatttcattgttttcggagaattttcacagttcattatctcacttcacagttcctaatagtctctctgaggtccatatggtaagaattagtaccctttactatatttgttgaatcacaagtgagcggaggaatgggtatagttgagacccacagaagtgaagtgacttgcccaaatccatatagcttattatgctacctgtttgttagaggtttcctgttgtatcagaaactagtgagataaatattagtaatttttgtcccattgacacatgatggtatatcaggaattctgagctcattttttttttttggctcaataagtgaccttagaaaatccagaatgggatttttaagttgaatatccttctctgacctgtgaaatcactgcatctgtttccctgactttatcacaaggtaacccaagatattgccaatatttacatgtgacaaactctgaaagatgtgcataatgctcccaaaggtcatcatcttcatacctaccttataaagtgcaaatggaattgacctagtctagaataagcaggcgagatgcagagagattatgtgacatagctaggtcatgtgactagtatgcagcaggcttggggcataaatcctagtcctctggctcccgagtccagtgttcattacgctatgtgacatgtcagtattgctgtttgctcggggttaggcttttcctttggaggttagagcttgataactctaaatcgataaacttcttagtatgccacagtaatgctagcagaaagtatttgttgaagcaaaaaatatgttgtttcaaggggtctgctccctgaaagataagtttttttctttatttgtggttttacatctaatttttctaatgtttcaaaaaacattctgtgttcctttaatctacaagttggaatggatacggtgccctaattttcgtgttccctttgagcacaagcaataacacattttaaaggatgataaatagctgtgtaaaatgtagatgggttctataaatacttaccaaaatccctgtagtcagaccctggtagaaggagagaatagtcaaagtgttctctctttccacattcttcttcttcttttaggggtagtttggtagttaagaacacagttgctagacccagacagactcagacttgagtcttgccctacctgtactacctgttagattttagggaactccttaattttcatgggcctctatttgtagaaggatgctaacaatattatgtgtagtttttagaacattcatctagtataatccctatacattttaagtaggtaattatgggttatctctcatgactgtttttatcttcatctgagaccctttctttcttcctttaagatacttctatccatatttttccctagagagaaacagtattagctactcctgcctgtcagtttaagctactgtgtcatgactattttgcatttctaagtttatccttacctttatcatcaaagtgctgactaatgcagtatctgccaccttgtgcctgctcagtaaatacaatttgggttaaactttattcatttttagttatgagtgcaatataatgacatagctaaaagttcgaaagtagagaagggataacaaataggtactgataatgccactcttgtaatactacatgtagctgactggtgaaggccatggactatagagtcatactggaatccaggcttcagtgccttgagtgctctacttagaaatctgtgctttaatttccttagcactgaatgagggcaataaaagtaaccacctaatcaagatgcagggtggatgaaatacatctgaagcatttggagtaaggcctggcccaaaggttagctgtaataataaaaaggtggatggtgacgatgtacatgatgatggtttgtgtgtccctttattcatattgccattcacaaattacttgagtagtcctacttctcctgtttggtttatttgttgcaagaaacatgtgcattagaagattgaagatgattgcgcccacttgaggaaaccggacccagagaggtgaaatgatttcctaaatagcacccagaaagtttatgatagagaggaacatagaactctagcagccaggctgctctattcttattttctctatacttttcttgttggaaaaggacactgttgactcctagttaccatctaacattgtggtccaagctacagagacagtagagcacattaagttctttcagtctggcttttatgctggctttgtgtgatagtgcctcatatccactgaaacgtaagtacttaaggagtggatgggaagtattcctggaaactcacagctaagcttttatgtaaagacagcacataaaaaaaaaaccacttttcataactttatggaacctgcaaaaaaatcttggcttccttcatgatgcttgcccctagagtgtcagcatagcccttgcagagaaaccccaggatacctgtatttctccaccctggccttcctctgagcattgagttgttagcatcaaaaaatcaccacagccacgttgatcctcattttcttcagcctctatagagcctgctatgccagggtcctgggtaatctgcagacagctgctgtcatgcagcctcatatatgggttgactttaccagcaaagaattccctcaccttcgagacatcactgacatcttcatgcacagcacagacaatgaaacaaacaaaaaagaacaaagagggacataaaggttggaggtcatttacatttgcatttacttgaaaggaaacatgctaacttgttgacttgactcacttgatgtactttttcgagatttcacctggaatcttgttcttgctagatctctggatatgcaaatcccatctttgtccaagacctaattcaaatgccaccttttcttgagaatgtcccttcatctcctgagctacaaccatctcccctttctctgtgctctgatagcacatcattaaaacattttacttcggattgatggacatttttgtgtgtctaatattttctactatatcttctagagggcaagacctacttctcaatatctttagcatggcacttactaggcactcagcaagtgccctttgaataaatgtattatttgcaatcatctcttcaggtatatgtagtttttgtgttagaagcttgctaggttgcatcttgcaagagaaacaatgtgatccttcacatgtacttgttcttctccgaatgactttctatgcaagaagcactggaggctgagttcatacgttcagcattgtcagcagaattgagtcctgaatgacctgggtcagtcactacattagatgatttgattagaaaaaagaataaagccagttataacttgttttctgcctattacccaggatatttagaatgatggagatgcagaagcatttagagtttttgatgatactcatggtggtatcatgaaaataacaccttgtgtgtttatggcacataattacatgaaactcattttattctcattagagtgtcaccttgaatcctgttctttttggtcttaatgtttagtgattagaacttgggaagcaatttctagaaccagaatggtcgggtacaaatcctagctccttctcatatcagctctgagaacttgggcaggtaatttaacttcatgatgtctcaatttcctaatctgtacagtggggcagccagagtacttatttcattgtattatttgagaagtgggaggacatagtgcatagtgattctataaatattactattgcaaccaccaggctttgcataaggccctaagtcaagaaaactttcaccgtttaacagagatgtttctctctgaaaggcatgttatttgagaaatagttgttgagatgaaaggggggaggcaagatagaggccagcttgatgagggctttgaactcagccctatcaacaagaagaccatagggctgcatagactgaggagaaacactctttgtttgtcgaggaaaaggaaacttgcaaagggatggcaccagcgcagcccgacagaattctctgtgggccacatctgttcatgccagctgttgtcagtgtgtgtcgcctcgccgagaataacagcaatgattttcactttatagcaacttccatcttgggatctcagaatgctgcataaatgtagattagggctcccaaaatttttgccaagaatgagcatactttacagagcatcaagaatgcgtcactcttctgagtgaatctttattggtgcaaagagaattaaacgaatattgaattagaccttccttcctgatgtgagctttcttcttgattttactccttattttctagatgaccttgaataactcagtttccctccttgacactcagttttcttcttataaatgaagggattcatgtactactaaatggtctccagtgtcttttctgtttctgaaattcacagaaggcagggaatctaaagttgcctcccacattttagaaaggcctaagttgttgtagaattgaatattttcttagcattttattcatgatatggtaagaacccggcagaaaatttttcagtttggtcactggaaaatgacactgtcctttagcttctaatgtgaaagaatatagtattatttacctgtttttccctttgcccacctttaggtacagtactatttattattttattttactattttaagatttaacattaattctctagcttatatctcagattgataagagcagttctacttcttttgatgagtcaagtgaatgaatgaagacattaaaaatgaccatgtcggccgggcatggtggctcatgcctgtaatcccagcactttgggaggcagaggcaggtggatcacctgaggttgggagttggagaccatcctgaccaacatggagaaaccccatctctactaaaaatacaaaattatccgggcatggtggcacatgcctgtaatcccagctactcaggaggctgaggcaggagaatcacttgaacccgggagtcagaggttgcggtgagccgagatgttgccattgcacactgagcaacaagagtgaaactccatctcaaaaaaaaaaaaataaataaaaactaaaaaacaaccatgtctctcaaagccttgtactcagaccacctgcatcagaattagttgggggtacttgtaatatttttggtttccatctttgtgcgcagagagactatatcattaaaaaatgtttgtccttaagaaaggttcttttgatagttcaagactttgtaatgtatgtgaaattccactacaaataagtggatgggttgttaaatctcactggcaaaaggcagatgagttgagagactgaggcacttttgttgcggttaagcatccctttctggaattgatgactggattcaaatcccaggttctccacttattatcacggtaatctttgtactccagctttctcatttgtaaattcagaatagaagccacctaatatggttgcactggtgatgaaataagttactcaatataaaacattttgaacacctactaagcactcagaataccttatttatactcttgtaaattatacataaattaatacataaattaaatactaatgtatttctacctttcagagtttgtgggaatggataaaagattccttcaatatgactactattattttaatcatggtcagtgattgattagaaatattaaatgttgctggtctttagattcactgtcagagcatgatctttcttcccctcggctgcagtgctgacgaataacactgagtcattcatattctctcatccaccttcctgccacatttgaaagacatccatagctcatatttgacagactgtgtgtgagcatttaatacaaataatcgtgcgccactgtcaaatattagcacatgccatgtgtcttcttatgtattactcacagtggctctcagatgaaggcatctacccagctcctctgcctactttcccaactccatttacaggtgaagacgctaaaggggggaacaaaaaacttgtgaaatgttatacaaaactggaggtataatttggcatttgaaccagcttgttctgcctctgaagcccacgctttctccattataccacaatcaatatttctgaaagtaaaaaaggccacattggtctccagcttctggtctaattagcaccatactttaatcagtgagtttgactgtcttgattaacctttacgatagaccatgtaagtttcatatttctaaatgaatatatagagatggctgtaaattagtggaaaaacactaagctggaatcaaaagactcctgcctaactcttggttctgccacttaatatgggtatgattttggctaatcacttaacaaaccactaacttggtttctacagaaagaagaaatgatttcatgcattggacaatattaaataatctagtgtgtgtgtgttgcacccaagtatcttttgactgtaaaagcacatagaaaggtgaaggaattttaatcccatggttgatagagtagaatgccacctcagttcctctgaattctgtccctcattcaagtcctaattcaagctctttaagcacacagtactctctctctctctctctctgtctctcttaatctgtatcatccattgatacacttgaataatatttatacatcatagtatatctttaaggatgatattagtttcttaattggtgtaggctggaccatctcatttaacttatggctcatgcctgtaatcccagcactttgggatgccgaggcgggcagatcacttgaggtcaggagttagagaccagcctgggcaacacggtgaaaccctgtctctactcaaaatacaaaaattagacagagaaattgcttgaacctgggaggcataggatgcaatgagctgagattatgccactgctctccagcctgggcaacagagagagaatccgtctaaaacaacaacaacaactcacaaagtaaattctatttaccccattttatttttgaaataactaataggtagtaaaattcagcatcctgcactggatcatacaattggtaagctgtggatgtgggatttgaacccaagtaagcagaccctagaacctatatatctaaggcatactgattactatcaacgttcaattttttgctttgttcttttatttctccttcatataccttgatttcctgactggattataaattctatgaactggttgcatctcactcattttgatgactgctttaatgcctaattaattactattatttgtggataatttaatatagatttcataggaggctatagtttgctacactgctcgtgtactctagaaacaaggacccttgacttttttctcttctttggctataagcttatcttcttaccatgttgagatactttgatttgattttcactggtcaagcaaaaaaacatgttcttgttattttcacttaggcactttgtctgcctccctgctgaggcccaaaaattcagtgtgatcggtgtgtctgtcagaaggtaggattgcttgcctagggtggcattgttattgaacaaaacacatgccctttctttgcatcctaagtgtcttggattgctgagccagaaccgctctgactcaaatgaaaaccaccttgtgttaggtgaaagatggggagttaaccatttgtttgctggtttgcatttcccacgaaaaactcaaaaacagaaatttacctcgccatggaaagtgatgtgccaagcgtcatatttgcatattaaaaccgaaaactgatttgcatgttatttcagtgtcttgtgtcacgttcaggcatctgtcaagcccactagacagaaacagcttgtacagtaggaaagtgtttttatgcatatcagactgaaaatctaggtgccttatttttatcagcaacttgtccacactttgggctctccaatctctcctaggttcatacctgaaaatactaaagaaaagtctggaaccccatgttttataaagtatgtttcctgttattttctaagagctatccatttttataatattctgtttagataattttaaaattataaagagaaaaactcaaattaatcataatatcacaatcctgacataagtcttgttaacatttggatatattcacttctagtagctgtttgataatacttacataggctaacatatactggcccttttgcatatatatttttatacatttgtaattatcagatgtactattttcatatcttcttattttttggcactataatggcaagaattatgacaatccaagtatctaaaataacagattaataaaatcttattttgagcagacaggaaattagaaccagtcagggctggagccgtggcaaccgaaactctgtgccgtctttttgatagtgctttattaaaactgtagcttgtaattgaggatagtttttctatgggacaatgcatagaaagctgtgcatggtgataaaacctttttttcccgacattagagcaactagcccattgcattcttccaggcaaccaaatgaagatgaaacgtgtgcctggagtcactgccaggcatgtggggcacagcaaaggccaaaatatggttttagtttgaaaacccaaccttgaataatggttcattctattcatcaaacttttaggtcatgggtcttgcctaggtgaagccatccaatggaaataatgtcttggaattctcttgcctttattatgtcaaatctctaatatataacatccataaagcctaattaatgggaaaaactgagtgtatgttttagccataacattgtggaaataggttcttttagtttcacacaaatagagatcttctcaccccaccgagaaaactcgctttctcctttacggagggcccgcatggaggtttagagggaaggaaccctgaaatgagaactgtgaataaggttggcaggagatctttgacctagattctcctcgactctgaggatttggcgcttctgctctgcgactcgcttttcttacttcttgcctacccggcaggataacatcagtggttgtaccttgtctgccgaagcctaagggaggctgctctgctctaaatagccaagcatgagctttactttactatttgtcttttggtcctaaaggcgagactgtacaagaattaatagttggagaggcagcaaggcatacgttcaccaaatggcatgaatttcaagatttgtagctaaaaagtactcagagtaattacatcccttgctaaagcaacaattaatgtgaaattcgggtacactacactgaagtcctttatcagcagatggaaaagtggagagttactggagagatctcattctgcaaacattctgcttccaagaagaaaatcatctttgttagtggtttctaagttgtccctcttgataattataactgacatctatttgatatttaatatgttacaaagcttcttcatatgaatcagatattattattctccagtttatatatgagaaaatcaacaatagaaaaagaaatcactggagaacttaagtagtatcttagacatcaggcctaagagccagatgctccaagcccaggcactattatagctgccttgacacgtggagacggagagaggtgggtgtggagagacctcactttcccccagctcagcctagataaaacccttgtgtgcagagaccagggccccctgactggatgcccaggccttttcccagctgcagtaactcttccaacaactcctcctgtctgtaattcagaatcatccatccttggctatgactccaaatttggtttaagaaaaggcattttatgggcatcgatgcatggcatgagaaagggaatatgaggaagtagagattttaagaaaatcaagatttcgaaagttgaagatcaactgggatgagtttcaaagcaagaatcaaacttttaaagtcaaaatttctgggtcttcctctttgtgtccttaaaattcattcttcaataaaatggaacataagaatagaagaaccaagagcatgcttttctaatcccaaggagctgtgaggagtgttcatttagaagatttcaattcagatagtcaggtatccaccttccacttctttccttctctgtggccatcgcttttaacctgaaacagaagaggtatccagcaaatcatctgcccctggccagaaggggttctccttccatttaagcagtgagatgttgagagtagagtataattcagtgagagtcaaaaagtagaagcagccacaggaaattgcaaactgcagacttgacacagctaaatagaaggggggaaaagaacgaaaatatcagaaatatattttttctggcaggctttcagctctaaaacggggctaattctaccttttgaaaagaagataatttcaatgtttcttttttttcaagaacacataattgaagttattttccctctgagggaaggaacctcttgtacatcactacaaatggacaagaaaaatgagcagctctggtacccagagtgatagagtattcattatcatgtaatctttttgaatatcttggctgccttttcccggtgttttatccgcctgagcggtgcttttctggtaaggttcagatttgcagtaaatttgagttatctaacaccatgtaacaaagaaatcaacagcaggtaagcactcaagaaagaaaaatgatcacgccaaggtcagccccagaggaactcagggggctgacattgcgacagatagtgggtatccattttgtaaattggatccttagcacacaggttaaagtaggtaaattgtagtaacaaagatgcaagatggtgtggtgttttcctgggagccatttgcaccttagtgcgggctgtttcccatgcttcctttttcctttagaaaggatgatggatatttttcttctccactcagaaaaggggcagtgggatgataaggtgattaacctttgtgtgttcttgatttcatgccccaagtgtagtgaaagttcagtaggctgcagaaaccctgtgacctgcccattgcttactcagattcagaatgctgaatgaagttctggatgtttcaggggatgctgacaactggcttaagtcctctcataaatggaaatctctgtcataatgaggtttccacttactcagtgtgtctatttttatagactacaaaggatctgtaaatatgaatatctgtgatttcactctaaagattggtaatgatatgtgtcttgcatactatgggcacaaatgggcacaaaaaaatgatagagtagaaccaaaggaagctttgaaaataacatgttacacataaagaaactgaggctcagaaaatggaaatgatttgagcaaaatcactggacaacttaaaggcagaactaagattaaagatattctgaatagtcaggtcttctgtatttatgggtttctatgtaaatgtataatcaaataccatgaagtgttatatgaatatgacagatactgttatgtatgttattcttaatctagtggagtttccttcttcatcaagggtcctattcatgtgtacattttgtttcagaagcaagtcttcattactgcatagtcccacccataatgtttaccagggatttagacccagatttggctgtaaatttggcttcatattaagtattttcttgaatgacaatcacctgggcccctagcaagaaaagaggaatggcaaagaagaaccagttttagataattttcagctgaaaaaaaaaaaatctttattttaagaagggaaaatacagaaacatagaaagaatataaagcattcaatttcccatgactttcaacgattaacctttgagcatattgtattgccgtaaggcaggtcagcctggccagcgagtgacttatctccatgtggtagttcagggcccagtctccatccttcctgtgcctcacaaggccacatctaactgcaaggagcatgggaaatgtagtctagcagtgtgcccagcaagaggaggaaatggattttggtgagcagttagcaggctctgccatgcttagtaaacatcagtcctttttaaagcatattagccactaaattgctcagaatgccacgatatctggctgcgttttttttttttgaaagtgtcagtggtcttggtgttagaagatgtttgccaatacacttacttcagaagcatgactttcataaaaactcagctcccatttttaaatctcataatgacttcccattacttaaaacaggcttggcattgaccatatcttacttctcttttctcatcctagttctgtttttttccctttttttttttttttttttttttgagacagagtctcgctctgtcgcccaggctggaatgcaatgatgtgatctgggctcactgcaacctctgcctcctgggttcaagcaattcttctgcctcagcctccagagtagctgggactacagacaccaggcacccgccaccatgcccggctaattttttgtatttttagtagaggtgggatttcaccatgttagctaggatggtctcgatttcctgacctcgtgatccgcctccctcagcctcccaaagtgctgggattataggcgtaagccaccacgcccagcctttcctcttaacagttttttagatatacatgttcctcctgaaatgcctttaactttcttccttctttcttttcttcttcttcttcttttttttttttttccggctgttgtacgcaatttattcttcaagatcaaactacaggtcatctttttttggcagccttcttccgtctcagaacactgaattcatacctgtgttttagagcttagactttattgtaattgcctattttcatgtctctttcttcccaaactgtgagttgttagagacaggatctctgaataatttgtctttatacttaaagttcttggcacttggtaatcccgtaggagatttatgttaagacaattttgacggagtcctctaaaatctgtcgctcagtaactcacctgtggatcatataacgttaacttgcctttagtaagagattcgggtatttcagaaacaaacatattagtgattaagattgatacttacaagaatgtctttttttaagagaaaggtttgcttcacaatgtctttgttttgctatttggcagcaaacctccactctgataaaagaaatctttgcttagataatagactcagactaaaatccaaacagccgcacagtaagagaactagaaagtcttggagacaatgatatcaaaaccccgagaggcattgcagtgaagaagtatgcccaactcagcacaccccagtttcaacgttctgctgtttttaagcagcggtacctctacaaggttgctcacttatcttcttaagtctctattttctcatccagaaataggattacatgtcatacagggctgttgtgtaggcatttgagatttcacatctgtgaaagtaggcatcttgaaaagggtcttgcaaacatgaggaattaatatgctacagtgaatatgttgctgatacaactcacacttctacttctgaagaaacgagaaacaaaaataacacaaactattccctttcagcacctcccaccacaaatattcaatcgtgttttattacccatacaatatgctagaagttgcttattaacaaataagttggacacagttgttcatttttcttaggaggtattgagccctaaacactatcgagagagaggtattagagtaggtctctgattatgacagtaagaatagtactggattactgcttctaggctcgaacactgaaagttttaagctgtcttctttggtgtaagagacaactcttaacggaggaaccctgtgtttctccatggtgtattccacaggtgttaagtattctgcactgggttagtgacagccgtggagtggaggtggaggctgttctctagccaaataaacttcagaaatactgaaagaaatggtctctcagaatctttcatcataagaaaaaaacaggaatccataattagcattagataaaagagtagaatctaacagaaaatagcctttccaagtgttatttcagaaacagcatagcaagcaaatagagtattcagagaacaaaaagaatgataacgtttttctcaaaatctgtgaaatattgacaaggtaagtactttgaaattagatttatacttgaaatgtaagtgctaggggtagaatctaaatttctggcttagatttataaaggacaggatcggccttcttgctgccttgtctatattgaaagggaaactgatattaggttgagacaatgataaattgtgtctgttctctgagggtccatcctaagactgaagacaggaattatcaagttttctctaacagtcgtttggcttaattaaaacaacttgcaccattattattagaggtaatattttatacttttctagcactctctgtgggaagcatcgtttgcttggggaaaaaatgcatggcacttggagacaggtgacaccatattttgggctcaaggtctccctgtattgcaagcctggagaaaaggtgtaggtcacttcccaacctcattttcaattccactacctgaactgtaataatccactccctcagaggcagtttgagagattcaaagagatcctctttgttacaattgtctgaaagtagttaaactctatttatcatgaaatgtgggttatctcactttaattcttacagagactgtgaggtaccactggcaagtccattgatagaagagaacctgaagttatgaaaggttgacaagctcacctaaggatgccaagtgaaggtcatagtcaaatctctgtctctaaccttaatgatactgccgtataatgtattcctttatctctggccaccagtatattagataaactcaccatctcatttcagtcttgctgctctcccattcaccctctacttcagcgggaactttctaaatatgattagaacactcttctaaaaacacttaccgtggtttctaatgcctggatgttcctaattgagaacatgcaaatatattccccgtggtctgtgaacttcttgaaattgtaagtaaattttgtgtacactgcagatacctgttttgttgttgttgttgttgttgttgttttgtcaaaagacagtttaacacattagattttgagacttgtccacgttcttacccaaggcctggagcccctagctcaccgagaagccctaaacatctcagcatggcatggaagcagtaattaactgacccttcctatttttccacctgtccagaccgaaatactgaaccacttgtagtttttcccactcacaccaaactacgtctcaactttgaaactgtgctcctctcagggtccttcacttggcctgggttggaagctccaggatagcgggtcatgtctagcatatctttatcacttgaagtcatcatgtttaaaaagatttatattcatggattacaaaagtagaactacttgctgtacaataaagaaacaaatgtagaaagtgaaagtcccctaagattccacctgctagaaagaatctcctttaacatttccgtacctggtctttatatagacctgtaaataaactgtagttactttatcctattctgcagttggatttgttctttatgaaacatgtcttgttcatctttgcaggcttgttccatagatttacaatgtacgtatctgtcattgtctatttaggtgattcttttgctggttagtttaccttgttagtccttgttcctcctctcaaatatggctcctgtgaccaaccttcgtcatttaattttattcacttgtatgagtacttctgtacaattttcctggaagcaagtcacatgtatgcaatttaaagtttaacaatactggcaaccattcatccaatattcatgtttatgcaaatacctatcaatatactatgctatatatatatataattttttttaattttttctttttttgtgtggggggaaaatagaatctccctctgtcaccaaggttggaatgcagtggcacgatcttggctcaaactgtaccaccgggttcaagcgattttcatgccccagcctcctgagtagctgggattacaggcgtgcattatcacacctggctaatttttgtgtttttagtagatacggggtttcacagttttggctaggctggtctcgaacttctggcctcaagtgatctgccagccttgatttcccaagatgctgggattactgatgtaagccactgtgcccgacctgtgctttttataattaatcatttgtgcatgtttcttacccccactagactgcaaaactctcaaaaacaaaggttgtgtgtaatatatcttcatgtccctcctgggttcttacagaaggtacacaaaataaaccctgtaagaatgagtggataaaacaataaacaaaagaataactgaataattcagtagcttctctaatcctcatatgacaggtaatgtttacagttcagaggaggtcctaagtttaacctttaatgtttgctaataaataagtcagtcaaggatgagctcttgtcctgactttatcaaaactagccctccctgatttttggggggctctcagtttccctgtctcacaaagaggagattagcataatggttcttcagatcctggcaagcaactcaattttttttgtctgtaacctgagcatatgccatagtttactcatcactgtctcatctctaatccaaattgttcaacaatgcaataaagtctcaggctaaggttagtgaccagcataaaatatttttggccttttcagccttctgcgtgtctgtacttcaaatgtctgtatattttgggaaaccaaaaaaaatggaaattattttagagaaaaggccaaataggtaccaatcaaccttcttgactatgtttagaagacatttaacgctttagacatcacacaaatgattaatacccatcttggagttgtagtaaatgttgggaatgatagcatgtgttcagagatttgtactttacaggattttcacgtccaagagctcacttggtgtagtgaagataataggagaatgaatatgtagctttcagttttgttgaacttactcttgtaaacattctgaaaagagaaccttttggccaactattttaacaatgcataaatatcaaggcaagagcattcccaacccacatctctgcccattactcatggcagacatcatcatcagttctaaatttaaataatagcatttctgtttttatcacacttttattaagaatgttggggtgagatattagaaatggtcaaatttataggcaatggaaaatgtgataaattcccttttaatcacatagcacaaagctactttaaatctagtatatggcctttattccttttttacatactttttattcttcattgatgatctcaagtactctctcaattgatatttgattctcttgcattgctataattctggctcgcccgcctatttattttttaattttttttttactgcagtatgttttggggtacatgtgagttttggttacatggatgggttctatagtggtgaattctgagattttagtgcacccatcacccaagcagtgtacactgtacccataagggtggaatgaagggggaatagacaaaggccccagtggccctgcatgtcccatatgggtacaggggatgagggataaaagactatacattttatatggagtctttgatccctgcccccctgcccaacctggccgcgccaaagccccaaagtccatcattttgctctgtatgtcttcacatcctcgtagctttgctctcacccacccatttcaacaccaacccagtgtcaatgctactgacttatcatcactatttgaaatctggctgtttgcagtgctggaaaaatgaaattactcaacttccttaactggaacaaaagaactagaaccaaaatgttcgctttctggactcctgtactcgataagatttatctcatttcctatctcaaagtttatatgtggtcccgaagtacacaacttccacaagctctttatgctgcttgacttttttcacctgagtgtgagaaacttctacctgtatgttttctcccttttagctgaataaggcctagcctgctctgctccctctcttcaggaagtccgtcgcgggctatgcgagaggtcccaccttatacccttattttgctcttcctgcagctgtttttctttaattattaatgtgcctgtatctctcacttcactgtaaggttcataagaaagaaagactcaatttatttttctcataaatgtataacagcaaatagtgattacttagcaattgttgaacaaaatagattcttcctattgtaaacatggatttctaaagcctgatagatgactcatctagataaggcaaatgagtaaagagatgtgtccaaggttagccactgaataagtgataaaactaattctaaaacccaggtctcctgacagccacgtccagtgctttttcctctccagtgcaatcgctgcttgtttaggctgactgccttggttgatggtctaggtggcaattaaaggactgtgtgctttctgcctttcagggtggccattcagggcaactggggccttcgtcagttgccccttcattccgcccagaggatgagcttgagcacctgaccaaaaagatgctgtatgacatggaaaatccacctgctgacgaatactttggtgagtggggcctagagctgacttctgaagtaactatcttgctctgatttccttccttagtaattggaactattatcagctccactggtaaagtatttgagtccagatgcatgagagttgatatacatccccgcacaactaagtaattgtaggatttgcatttgcaagactgccatagatgtgatgtctacttagcttatactaaaatttcagtggtccttagagtttccttagatacaaattttattgttgagacttattttttaccagtctaggcaacatggggagaccctgtctccattaaaaatacaaaaattagctgagtgtggtggcatgtgcctgcagtcccagctactcagaaggctgaggctggagaatcacctgagcctgggaggtcgaggctgcagtgagctgtggctcagtgagctgtggttgtgccactgcactccagcctggacaacagagtgagaccctgtttttttgttttttgtttttgtttttgttttttgttttaaaaaagaagacattttttgacaacttattagcttcccattaggcagaaataggatttctgtgtatgttcccatttctcactggtctaaagattcaagtaaaaaatgtggaattggatattgtctgatatccaatttccagattgtactcttaatttttttttctatctcagttgaagaaatgatgttttctttgtagttttaattttcccctcttcaaacttgttaataactaggaatggttaatccttccaatccatgaatataatgcaaatttatgaattatatgccgattgtgaggttctgtggacgcataacctgtcctcagtgaggttaaaattgttcagaaagaggtaagacaagcatacaaataattactagtctaggtagaaagtgataaaagacatgagaaggcttaggtcaattgttgcaaattttatttttattttattttattttatttatttttgagacagagccttgctctgtcacccaggctagagtatactggcgtgatcttggctcactgcaacctccacctccggattttgagcaattctcctgcctcagcctcccgagtagctgggattacaggtgcccaccgccacacctggctagtttttgtatttttagtagagacgaggtttcgccatgttggccaggctggtcttgaactcctgacctcaggtgatccacccgcctcagcctcccaaagtgctgggattacaggtgtgagccactgcgcccggccagaagttttaaaagctccatttattaggagcatccggaatactttggtaaagaattggtggcacttgaatctgagccctttaaaccagtgcctttcacattttctgtggtagaagaccattttcctcccaatctgttggagaccagtatttttgttgagtcagttaaaattaattactagggaaataaaagacacaaaataaaatggaagatgaaattttatcattattagagttaactgttaacgaattactcttttaaatttttatactagtttctaaatattaatcctttgttcctgtatttatctcatccagggtgataagcatttcttagacacccatccatggaccactttttgagtggcactgctttaaggacaaatagagaaacgacatttggggaacagtattagtaaaggcacaaagatggggaaattgcacaggatttttgcttcttcaaatattttctattttcatgtcttttttgctcctatatgggaatatgtaatgacaggtcaactgaccacaccagtccaaaaacacacagtagatgaagtaggaggtattaggatatgaaaaccctggcttttatttgtgttggggtggcagtttagcttagctaaaagagcaaaaagagtgggaatgaaacatctggttgtggtctcttctctgtccctcgctggccaagcaatactggcatgtcacccatctgcctgagccccatttcccacctcactatatcaacggttggggcaaatgttctctagcatttctttcaacagtaataagttcaatgtacaaacatccttaatctaaagtataacaataaagctaaacataaattgatggagattaacaacaatgcatggagaacagtaaaacaaaacatagaaaatccacgaaggtttctagttacatcaaaatacacaaaaagtttattaatgctcttgtcattgccatgtgaggagggtttataatggggtctaaaatacattttttaaaagtgaaaaataaggtctctgtatttaggtcctattaaaaaggaaaagctgacttaccaagtatatatgcttcaaatatcatagcaacaaaatatattgccacaaaaaaaaaactgaacatagatgctaattgcatgaatgaatatatattgaacactctgggaaacagatataaattattacctttcccttcaagaactgtccaagctctactacttagtagcttagaaaacttgaacaagtattattccctctaaaccttcatttttgttttgttttatctgtaatatgggaataataactagcttatactgttgttttaagaaatggatgaaatatttatacaaagcacttagccaagttcttggcatgtagaatatgctcaatacaatactcaaggttctcccatgctcttggggcttatagtttatttaagacataagatatgctcgttaaaaatccattaataatgctcaatttaagtttaagttcctagcaacaatagaacgtatgtcactggtaagtaatcattgccaaatggggatgaataaccatttgagaatttggaaaaatggctaacttttattgagtgcttatgatatggcagcactatattttatttacattataggaattaactcatttcactcttataggaaaacataaccctgtgaaatagatactattatcattttcagattttgaaattaaggcacagaaatattaatttgcctaatgtcaacagctaatacattgcagaactgaattagaatgcagatctgtacatttacacaccacactgtaaaagatggggaaagctagccaggctacatatttagaagagtgtttatggtggagattagctttggacagatgggaaataagagatgagcattctcttctaggtacacagaattaacaaaatataagttgaggccaggattatttaaagaaaatttacgttatgtagaaaacaaaaaaaaaagtgcctatggtaatattcaggctgctctgctaggtggtggtgggggtagatgtgggtcttacctttgaagttcttatagtctaataggatatgtgtacagagttatggtgttataagcacaaggcagaaagtgacaagtgacttaatcaatgttcaccaagtgttctttgagaattcagaaaaaggaaagagaaaatcaagagagagaaatggaaaagtatttatggaatacttagcctttgagtaagtctttaaaattgtgctaattgagatttggaagtaggaagatagtagagaagtgaagtcatttctcatgaggggagtttttgacataacagggaataaaaccactggagtgaagtgtccacgtgagaagtagcaaatattgggaaataaggttcaagtagtaggttaggaccaatctagggaaggctgtcaatgtccggctaaaggctaagaacgttattgtctataatgagcccttgcacattgagatcacatgccatgagaactgctctgtggatagtggttaaaaacatgcactccagagccaggatgcacttcttaccagcaagatgaaatcaagaggcaaaggactagtgaaaagaactgtcctttattgttccgtgctttaaacatttctcaagcaccttctctgtgcctgctactgtgctgggtgttcaggacacccaaatgcagaggctctgccctcatggggctcacgggttcctaggaaggacaagagagtcacagatgtcaaggattttagtgcagatattagcactgtgttgggtgtgactgagctgctatgtgagagtccataagtctgcctgaggatgagcggaaagaatacatagcagtgtgtttgcatcagcagggcctgacccaagagcgataaagtcttctcttcctttctgtcagagttttacctttggcctattctggactgcaaatagcattgccaagcacttcccttaaataacttctcttttttgcaggactatcctctcagccctgccaaaaccccatcacctactctttctttactactttgcctatttaatgctggaatttttatttaaactgtagctgatttactgaaggtaattaagtgctttcatgctgtagatctcctgctagactacaggctgtacttgggagtgagagtgaacaaaatgtaaataaatgatgtcaacagagtaggttcctttgtggtcatgttgctttgcttccaagacactcttttttttttcataagtagaatgattcatgaatatgttattatagttcttgtttctttgcggagcccctcatcactcttaacagttttatttatattgaattataattatcgtatgcttaaaagtactgggagaggtaccagaagatcacctcacagatgacttaagtacaaaggagaaaaggaacttttataatggagaggtctcctggaagccgtcttaaaccaagtaatgaaatttaacatcctcaataatgggacagactggcatgtgccaactgaatgtaggaagtctgcagcatcgtctaggcagtggtcttgctaaaatatttcagctctatccaaccatgaggaagtaaaaaatgcagatgatgggacatgcttcaagacacctgtcctgaattctgcaacactgtcaatgttataaaacactattctagattaaaggaaattgaagagacatgccattcaaatgcaaggcatgtgtcttgattgaattctggatgaaaaaaaaaaaagctgtaaaggattggtaacaaacttagagaaatttgaatatcaatgatatattagataatacatcaatgttaatttcatgatgatattaatggtgttgtgattatgtaggaaaatcttatttttatgagctatttgttgcagtataaggtgaggtatgattgtgtctacagttttattttgaaatattgatagagtgacagaaatagagagagagagacagaaagagagagagggatgattgacagatatacgtagacaaacagagatagagataaatgtggggaggcagaatcacctcaggttaaaacagctagagatgctataactgcaacaactataaggactcccctcctctctaaaagtgtactgaagcctgtcacaaatgaattaccttaagaatcccttcttgggtgggtagagagattgacatttctgcaccttctcaactttcctgttttaatgactacagtgggtctttgaaatttcccgttatcgttttctttttttcttattttttaccagacatacacatcttctattgctggtgagatgaggacaattgtggtagtgatgacaaaagctgatatttacctagagctccatatgtttaaaaaaccaagtcgcagccacaacatgactggcagacctggcgatgatgtcttcatttcattttttggatggggaaatagagattcagagaggctcagtgagttgttcaagctcacatagctaataattttggaatttggcctcactcttctgatctcatgtctatcataatacattaccattacagaaaggtatataaatgctgttcctgctgaatgttagtaactggctgtttctctcccatgtcataacttttccttatgaagttatgatcttcaagtgagagatggagggactgcttctgcccaagattacatgtttgtaatctggacttcgatgtcactgatatgtttcaactatcttaaacatcctgaattaactgctgtgacatggctgaggtacatacattaggaagaccgtctaccgaatacctacctatcagccattttgcagtctgtagttcttctcttgaccatgggagaaggcaaatcactaatagccaccgttcttattttttcaagtcaggtttttttataaaatataacaaacagggacccttaactgtctcagctgggtttttttttaatgatttcttctggaaaggtgatagttttagtgtttccatgccttcttttgtccatgttcattataacttgtgactgtcgcattacagtattaggtaaatgccacagatgttgaaccatgataaagcagttggatgagtctatatctctaaagggaagatacagtctctatactgtgggcatttgccatctacttggacttaagttttggctataacagatttccttaccatggacctgtgtctttccattaatactggtgtcattgagagggcctctaaacactaccctgtagaggaaagggaggaaacatagtagaaagttgggggtaggagaaaattcttacccagttcaataaaccagacagtgagtgtttagcccagctcatctacaggaagccttggttcaagtgcttgcattttagagcaaattttttcctagacaactagaaaaatatgttgatactaaaggaggctctcagttctagtgatagatacttaaaaagaacaaggggtggctcatgcctgtaatcccagcactttgggaggctgaggtgggcagatcacgaggtcaagagatcaagaccatcctggccaacatggtgaaaccccatctctactaaaaatacaaaaatcagctgggcatggtggcacgcacctgtagtcccagttactcaggaggctgaggcaggagaatcacttgaacccaggaggcggaggttacagtgagccaagatcgtgccactgcactccagcctggtgacagagggagactccgtctcaaaaaaaaaaaaaaaaaaaaaaaaaaaaaaggaacatggggcgatgaagtagctgtaaattattataatttagagtcaattcagagcttataatagaaaatggaaaacttttaaattgagtattaaaatgaataggagagaaaggtattattctcagaaaattgggacatctacagggctagttgccagttttaaagtttgttttttcaaacagttttaggcagctaaaggaaagcaaagttgagtttttctccagataaccttgagatatctctttgaaattgtccaagacttttctgtgttggttgatacagccacagccttaagtaatacacccagagcctctaagttttatgctttcattcattttgtaagagaaagcgtgtttgtatatgaagcttttcatacatgcatgtctgtgactatggcataattttttccaaataataatattctggctgaggagccctcaaggctgaaggcaacactgttggaagacagtatctctggaaatggatgttgtaatacatctaaggatggactggaaatatctgacagtagatttttaagcatagagctgtaattatcttgacattgtttatatgatattgtcttattccttctttaaaaaaaagcagaagtatgtgagccttaaaattattgagtgagctatttgaagaatccttcagagcagtgccaggtaaattatcttctcagaacttagcatttatctaaggaaactttttgttcatctctgagtattgttagtaggagtttttgagaatttttgcagaaaaccaggagtttgttccagtggaactaggccttcatttttcaaaggacagctagacaaaagtgaaggcatgaggcagcagggacctagcacatgctaagccttgagagaagaaaggcgttaacatgaacaaagtgctatgatcggtcactttattggttatgccagctcattgtatttggtgccttggtatcaactcaattaagatgaaaatggagggccagtgaatgttcatgaatagaaacagaacaaaaaaaacaatgaggaggatggtccattttctttctgcactagtgggaccagttgataagtgagcttgtccagaggacttgactaagatgcttaggaaattagaaaccatgatttgaggtgcagttgaaggtatggagagaggaaaacctagagccctcattgctgttgaaagactatcatgtggaaaaggaatttgacttaatatttgtgattcaaaaattagcaacaaaggcaagtgaggggagtctggccagttcccattcagcgtaatgaaatcactttcttaagagacagaagaaagtctttgtaaaattctaggtcagaatctaataatcccttgttggtgaaaatggtgataggtactcaagcaactgatggatgattagattatacttcataagtgctgtccaattctaacattttgtgacttaggcacaaacaagacgctaaacttgtttggaagttagcgtcttgcatccaacttctaggtctacccctagattatcattattattattacatgatttcaactaacatttatataatgctttttaaagcacttttctacatgttatatcacttgagcaagacagcagtcctacaaaatagacagtgtgtttatttccatttgggatatgaagaaatgaaagatttcagtgattaagggactccccactccccagggctctccactaccctcacaagtcataaagcaggtaagtagcagaattgccctggggcacaggcctacagactttaaattcttttcacttttcaccccattgtgctgttaacaccatgttgctgaattggtcatgggccataagatagatgagttaacatacttcatgttttagctttttaatctgtataaggaacgatgtgattactttgtaaagtgcttagaggatctcaactgagaggtgtaaagtaatttgtatttcatagtttgtgttattatgtgacaagaaaatggtttccaaagtgcttctatcaattacaaactgggaaatgactccaggtaggcagctacctttagtggatcttgttttcacagataaatgacctaattaatgaaaaaccccaaaaccacaatggaagaaaaattagacaataagtggcttagagagaaggttgtattgatttggggggaaaaatgggttttttggttttgtttctctctaactttttgtttagggtatctttgagttgtgggaatagaatgttctctagttaatgaggcatattagatatattttcttttgtggtagtgacttctggtaatgtttgttcagagtagtatatgtttacagcactaaataaataataattctgagcattttatgtgttctatcttagcatacattaattttttattaatttggctagtgtgtttgtttgtttgtctgttttgtgtcagagtttcactcttattgaccaggctggagtgcaatggtgcgatctcggtgcaccacaaactccacctccaaggttcaagcgattctcctgcctcagcctcccaggtagctgggattacaggcatatgccagcatgccaggctaattatttttgtatttttagtagagacgaggtttctccatgttggtcaggctgatctcgaactcccgacctcaggtgatcctcctgcctcggcctcccaaaagtgctgggattacaggcgtgagccactgcacccggcctggctaatgtgtttttaagcattgatttggaatcccagacttagagtaaagaagaatgtgatcttagaaattatctaggaaaatccttcattttctagaaaactgtatcccaaatgacttatccaaagccatgcaactaggtgtgttttgaattctatggtcaaaattttctttctgagtaatggacagtctccgatggcatgaagaggaatggcagggctgtttacaaaggtgcagacataggtcgggcctgctacttttgtgatctcagaccgtagatccaccttattcaaacataagaacacattgtccttaaaaagaataaaataaataacttttaaggaattttgtgtatgtatttttcaaatacaaaagaaccaaagttttcttattcaaaagaaacaaaagagattcccagtatcttttatctcagtgtctttatccaatttacttgtaatatttcctatctgttttcttcactaaatgtaagtctgcgtgagggcaacaatttatgtttagttcagtattgtgttcctatcattcctggaataatgcctggcacatcggagatatttaataggtgttaatgaattaatgaactaataaatgaaaactgtgagcagactttcacacttctgtgacaggacatggtatatagtaaactatagggaggaaatacttcattcatttaagatatatttatttagcaccttataaaatcataaaacgttagagctggagggaatcttaagagactaggaaaacctcttcatttttagagatcatgaaaatgagtgagatttttagggtcccaaatttgttagtgacagagccacagagtataactcagattttctcattcctttttttaattcacttaagggcacaggaaaacatataaactagagtaagacatggctgctacatttattgaacttaaatttaaattgttttaacacctttggacttgatctcttttgcatgtatcttctgtgaaatttaaaggttcaactggtcaatgaagagagtacttggttaagattttattttttaagtactgggtcacatttcctccacctgtaggtttcatctatagtctttggttcccaggaccatttcgtaccaccacaattttcttctgttctaatctaattggattggatggatagggcatcacattgaaagaaacattcttttcttacgtttacttgagttgtccatagcaacctgtcctgaaagattgtccgtttaaagtaagcctcttcaagactgtgaaccaccacccaagattggtgtttcataccgtcttgatacaaacagcagacatccagtcattcagctgcgttaggatcactatctctttatcagaagaaagaagagaaaagtagaagagagatttctacttcataattgaatgttctttgcttattaactgtggaagcaaacttgaaattctgggagagaaagcactgatggggcacacattgtctgtggtgcaaagaaagtctcagtttggtactggtacctgaacctgcaagtgctaattatgcatcttctggtattaacacacaaacacaattaactgtgaactcagctccttttccctttcaaaccaccatcattcccccaacctgcactttccccaccactttctctaaaacacacagataagcatctccttacagactttgaagtgacattaggattgtcagaaggcataattaattgactgtcagcaaagctattgtttgaacatctctggagttgtacttggtaggcatcttgtttttttgttgttttgttttgtctgagacgtagtcttgctccgtcgcccaggttggaatgcagtggcgtgatcttggctcactgcaacctccacctcccaggttcaagctgtgctcctgcctcagcctcccaagtagatgggactacaggcacgtgccaccacgcccagctaatttttgtatttttagtagctatggggttttaccatattgatcaggctgatcttgaactcctaaccttgtgatctgccagccttggcctcccaaagtgttgagattacaggcgtgagccactgcacctggccctgttgtatttttaattgaccgattctttcctctacaaatatttattgagtgcctactactcaccaattattgtagtgtatactatgggagataatggaaatgatataatggccaaggagagaaagcatttgtcaaatcctctagggccaagggctttgatagagaacagatttcacaactggcagtggaaaatgtattcttttccatcccggttcagaggattttgccactgtacttgtgccatataaaatgctgaaatagttcatgagaagaggtacaggcatacatcttcctggtgtgtgaagatgagtggcaatgcactgtctctggttagagttcccaccaaaaattgtaaaatacttaaaaagaaaaagcaaaaaatatccgaggcaattaaaaaaaaaaaaaaaaagggaaatcacagaagcaggtccaagttaatgaccttatcccaattctgttcctaagtctgactctgatgttagtcatgttgtatttaattcttccagatttcctatagtactgtacagctctgatctcagtcctcacttggttctaaggtttgaccatcaaactttgagcttgcatgagccttgaacttggctctactcctatctggcagtgagcatcatttgttaaaattcaacaagagcaaacagaaacagtgtacactagtgacttgctgaaagagcctaagaagatacagtaggcaggagtaatggaaatgagtttttaacctccactgactcaccctttctttcctagtcacccttagggtcatggcaaagttacagaggcatttagaaatcatcttgcttgaaagcttccctttcttcagtcattagtgagcatcttcataattttttttaccatatatgtaaactatccatagtattatttgcctaatatttttatttaaatcaattaactttttatccgactttgtcttccttcatgtcaataacatctataatttgattctgtgggttgaagtactaagttgcttctttcctgtaaaagatattaaactgaatactatatttaaattttaaaaatacggctggaattacagatcacatctgtaatcccaacactttgggaggccgaggctggagaattgcttgagtccaaaagtttgagaccaacccaggcaacagagtgagacccccatctctacaaaaaatgaaaaaaatattactaggtatagtgatgcacatctgtggttccagctactcatgaggctgagataggaggatcacttaagcactggaggtcaacggtgcagtgagccgtgattgcaccaccgcactccagcctgagtgacagagtaacagtctgtctcaacaaaacaaaacaaaacaaaaaacaaagttcatttcatgcaccagctaatgtttgaaatattgagaaatgtggatatcattcaacaagaagaaaaattgataggataccatggtgaaagaaatggtgtcctcaagcttacccattaagtgtataaagcataattttttcttttttcttttgcatgcggagtcatcatgttcttgtgaaggatcgtgttgtgttgttagatattgttccaggcatccagcactgagaggcattgccggcctgatactgtcccactgactcactgtgacatcttaggccggtttctcttccataggtctcatctctcatatcacgagattagaacacatgaactattgtgatccttttgaccttaattcctttgcctcaaacacttttcatatattgtcctctctacactgttaaaatgtaggtgagtaagaaaagcagctgccccatataaaatttcagtgctgcttgcctcagagttctggagaattgtaaacaaacccaagaattatatttcctagatcactttatgctctgcttgttactgttacccatttcctgaggtttatgagagggtcactgccttgaaagtagctttcaatgccaggtaataaaagtggaataggatgttgaatatgatgaagaataccatgcactaagtgttgggtacactagcagcgtcactgtgtttcagcattttcagtaatggtgttcagtcatggtaattggcataccggctcagtaatggtgtttactaatggtaactggcatatgtgagtgatattagtgtgggtaaccatcaacggagcaatagtctaatgtagatgatacagcagtaataaaaatgaataattcatcttttgtcagatagcttagtaaagtgagcactagatttggagtcaggaaatccaagtgtaagtcatcttttctgtgtgacgttagtgacatgtgacatttgtgctctccttagagtattttgttatacagtcttgagaactcttcttttagcagctttaaaatgagtgttattttgccagaagaactaacatatccatggacaagtcagaagttaaaaccaaattatttcagttttcttgtttagattagctcttctatagaacctcagagtcttcctgaatttcaggtatttcacttattaaaaagataattatccctatctattttatgtgcatattgtgggaatcaaattaaataagtcggtatgaaaaagttttctaaaccgtagcagaagaccaaaaatttaagaggtgttagtatctccacctagtgcagcatctggtttgatttgtgtcatttatgattagtgtgtaataatcattcctctaaattgttaacgtcagtgtttatctctatttgaattaacactttgtattttcttatgatgttctgttgtaattggaatatcgctggagaatacaaaaagtgttttttagtcattgtgtgtgagaaagcaacacaccaagatataccacaatgttctcgtttgctgagcaaactactcttgctttttaatgtggaatgtagaagaactaattgaaaagagacaaaatgaattttgactcaaattgaacaggatgaatcataacccactttctcatctgagatgtgaggaagaaaatgtaaaggaaaccaaccaccacacagctttactgtcagtgtcagcataatcaatatagagtgtttttcaacagaataaagaatacatttctgcaaggctgagagttgcaggtagtcggaaacctagttatttttgctttgtctatagtctgctaaaattgtctcgttctgccttggttaaagcattctaatcaagagagtttggggcccctcagtaattgcttctcaaaccattcagaaatgtacctgtgatctctattgaacagaggccaatcagagactggaccctctattgaacgtctggtcccagtgtcattttgtcagatggtcaagagcagggagacggcagacatacagaaacctggacaggactgaattgctgcttccctgaaaataacttacttgggtttattgatgtgaatgattaaacaaaaacactttgtcctattggattctagaatttcgatgcataatccacttagcttgtgaatgtagcttaaaaaaaaaaagattttacacaaataaagaggcactatagcatatcccaggaaaaaaactctaattcctaagtcaaaatttatttctaatttttgttactattgtatttgattcataactcttatgatctttattttcctcatgtgtgtttatatattttctattttactgtaaaattactaagatgggagagcacatctttcttatcttactcttcctctcttccccaaaaagaaaaatgagaagaggagatagagctggatgatttttttaaatatctttgtgccactccaccaagagttttgcttgcaatagaggttctctagtctgatttgatcctaaaccattctcactaatgattctgcttaaaataagactagtacatattgagcactgactatttagtatgagttctacatgcattacttatatctggactataactctaggcagtagatactgttttttacaatgagaaagctgaagccaagatgagttaaataattttcccggaatctagtaattagagttgcaatttgaacacagaacccagctcttaacccctgcatataccatgcctgtgactatagatttcagaaaatgagctagccaaagcctggaaaaagattagactcacaggatctgtgctcattccatgacttttctggtaaatcctattctgttttttcctctactttccttgggggatgtttttagtatgatttgattttctctgattgaaagctctcactactaataagggagcaattagaaatacaggtacaccatctctttgtttgctctgtaccagatgtctgctgagacagtgtctttgccctcctacatgggtagtagtgcccagttgggctgcttagtccagataacaaaaggcgatttctgaccgtaattttttttgttgttaataacacttgaaatatgcatctttattcctccattccttcttggacttgaaacttggttattatgattgtagcaatatttatgtccagaaactctcttctccccacaatttgcctcaatccagtactgctttctttcacacacgtaaatagttttaacttttaacgatccatgcctatggcatcttctagtctagtgatgtgtagaaaagccaggcccagtctcattgcccaggtggaaataagagagagcaaggaaaaggggactgattttgaaaataaagtcaccctgttgacatgtcatcagtcaaaagagttcagtgcaatagctagcaattggctcactcagtcggaagttgatgctattttaggccgtcagcggcagtgtcaatgtatctgtgaattttgccattttatttcattaagatggttcaggaagtcagacactgattaactgattcttcgacttagttcccactcctaattttggatgtgtggtgtctttaggaagctgctgtgtcaccttgattctaaagaaaagtttcgttgtgcctctagagcaatccggaacagtttacccttgtgtctggttatgctggaacctgctgtgttctacctctctggtcacaggtggtatggggatacttttgcttctggttctcctctggcagatcaagcaaatacaatccaagtgcgtgcagcccgttcccattcaaaatgtatccgtcataataacagcattctcgctgacgcattagactcaaggtggacttaatttggagatcacctatgaagacatctgtggaaggaatggcctcagcattgcagtcactttcgaagtcaagaggtattctagacagaccacacagcatgtataggtaagactaggaaaattctaagttttgtgttgttgctaggggcttgtaatcttattttatttgtaaacatgctctaaataagaaggataaggatctctagataggaaatatatgttgttctttgtttctccatttattcaataattattgaaggcctatgatatgccagacaattgttccaagcatttccattaaacattagtccacaaaatatagacagaagtgcttacaaatagctcaattccaatatgatacattgctggagtttggtgatatgggaggaaagaagttagaatggcttactatgaatggaaaagtggagaaagattttctgacatagatcatgttaagactgaatattaatggaatttttcaggtaagccatgaattcaagggcatttcagacaaacaattcaatagggacaaaggtatagagaccaacaccaaaaaaagtgcaatatgactgccaaagaatattggaaggagaaatgagactaaatgaatgattagtggccagatcaagagggcctcttatttcttactaaagaatctagagtctgtcctgaaagtgtggaaactccatgaagggtttcaacaagggaaccacaagatattgattaaagatcactctgggtactattgtggggagaggtgttcaatgggacaagatttgggggatgaagatcagtctgggtgtcatttgtacttgtctaaggggaataagggctggaaccaagatagtcatcttgtgacaatttagagaagggtttcaaaggggcgtaagagggatgggctgagacttattcctgggcctctatcttgggtgggtaatgacatcactaagtgatgtgagaaaaagagaaggagttcagtaatggtgatgccatcagtccacagagatcctctctttatcaatacttattgagcacttgctgtgtgtacacactgttctaagcattggtgctacagcagatgaaaagcttcttttatggggcttacattccagtgagaagaaaatgatgacacataaataaaatacatagcaggtcagatagcagtatatcctattgagaaaattatgcaggagaaagggatagtgagtgatacagtggtattggagtggaagtattatggtgaatagtgtgaccgctataattgtgaggtctctattatgggtgaaatctggtctgcctaattttgtttcttttccattttttgtttgtttgatgaattattatttctcgtaaacaaggcaaataaacagcaatagcaacataaacatttacaagcacatagatgtaggcataatagtttgtgttgccaacataacacatgccaggaaaaacaaaagaaaacagcagctaaaaaaagtaaatatcaaaaaagggagctttctcagacacaaattcttatcattcaaaatgctgtgtagtttgaattagaaagtcacagaatgggaccttagatttaatccaaatctcttagtttaggcagaaaaaccttcagccgagcaaggaagtcagttattcaaggacacacaggtaggtctacaatttaggtgctctaacttcatgtctaaggatcttacccttatcaccatcccagaaaagcccaaagtagcttgggtctgaatttccactttgccacagtaaccttgagcaagttttgcttctctttgcaacagtttgctcatttgcaaggtagggatgattataaaagtgtctgtgatagggggttttggaggattaaataagttaataatacatgcaaattacttacagatgtgggctgacacacagttaatgttcagcagtactgagagtattgaaacgttatgatacaggctacttaggttttgtgtatttgaacataaacttcagaccaatttctggtgatgaccacgggtaagatattctgtgttttagttaagatgatttccagttaagatgttgaaatattaaatacttttcttgggtcactgaataattataaaatatattaaaataactttgatatttatttcattcatagaagttctagacaatccagtctagagaagagttatgtaaaattctacaccagaaatagaaccctaaccttgaaagacagggacacttattcatatatgtatgtctaacacaaatgggcctcataattgttgacagccacttattgagcattgaccatgtgccaagcagcatgctgaacacttcacatagctggtcttacttaatgctcacaacaggtaagcattcatatccggatttttcagatgagaaaattgagtcttaggcagttcagtaccttgtccaaggttatacggatatcaagagcctagatcttcataagccaagtctctgttctttttgctcagcaaatacctatttttaatgaggatgcttttctcaactagctactatattctgcaaccagtctgcattttacactgctatcctttctgtgtcattcctaatactcattcatagaattataagatcatagattgttaaggctggaggaaacctgaggagtttcttggttctcagcataaagactcagaatcacctgggggagctttatcacattcaaaactacacacccacacacatctaccttgtatttacaatgaaactctgatctactgacataaccctagatccactgagaaaatattattactcggagaaaatttagctgatggagtgtgccataccccacgtgtgatgagataacaaaaaaagttgacaattactgatctagtccaatcttacatcacaaacatgaaaacagaatgaagagtgacaatcactttctaaagatttttaaaatgtcacttataactatctgcaaaagaacctgcgtcttttgacttataatgttaagtgattttcttgtttattccttaaaactgcctttgtagaatgcactatgttatttgatggttctggagtaatacaaaagaagagagtgattaatttgcctgggatcctacaacaaaccagttgaccaagagataataagcttattatattatgcagatctatacctattcacttcgtttagttaagaaacagctcatcaatatggaatacacattttcatagtagatttgtgggttgcatagcttttttgtgtctgttttcaatttctgttcctttgataactgaacaaataacagagatggtgaaacccagcaagcaaattatcttccagattttatgtgatctcccttctctagtgagttggtatgtctactaatgacacagtagattataaggttatttggtttaagtaaatatttatgcagagcctatgatatgtccatctctgtcttaggtggggtgaattagaattactataagtgctttctgaaaaaaaaaaaaatgtaccatgaacaaatttagaggtctctgcccccaagaagtccatagaccattataggttagagaataaaaaatatatgataatcccttttcccatgtgataaatgttataaaggagctctgtacctatgattatgagagggaatgtttgagagctctaggaaaaacctccctagggagattaagaggtgatatctgatgtcttcatgaaggaataaaatgtttccaagtagagaaagagaagaaagatgttagatacagaagaaacagcatgtacaaaggtatagaggtaggaaaacatggtattctgggaacaggaagatgttacttcctaacagaacttctctgtggctgaagccacattgagttgagggacaagtagtgggacaaggaaggatagagagtctggagttcagtgataaaagatcttgtgtgatagtcataggaaggatgttttggatgtttacctgtgcaaaatgggaaattgttgactattgtcaaacaatgggtaacatcagattagtgatttatgtaaaactgaagggataaccatttctactgctgtataccacttggataaccttataaagccacttaatagggaataatggggctggaaatttaatgggaatagatttaaagtgcttgtgggataagaaacatgatattgctctcttttgttctctttcagttcaaaacaggaagtgcctaggtatgcagaaatgcaaatcaagccagctatatttttggtgtgttttgtgtgtgtttagattttcacacatcagcaatactgtaagaacactatgtggccaggcacagtggctcacgcttataatcccagccctttgggaggccaaggtgggaggattgcttgagccctgggagttcaagaccagcctgggcaacatagtaagaccctgtctgtacaaaaagtgaaaaaaaaaaaaaatggatgggcatgatggcatatgctgtggttccagctaatctggacgtggaggtgggaggaggatcacttaagttcaggaatttttggtggctgcagtgagctgtgaccatgccactgcactccagcttgggcaacagagccagaccctgtctccaaaaaaagaatactattatgtgaataatccaccagattcaactaaaaaatggccatgatgttttaaaagtacatatatacacacatatagatttaaagattactttcaactttctaagaaattagtagatctttagaaaatcattgtgcgtatgtgcatatgtgcattgtttgtgctggtcccaccttcaaggagaaaatatttcaagatcctgatgcttacttaagaggttgtatgtgtttaccatggaaaggaccttggaaatcatctcctaattctgacttcattatttatttattttgatgaagcaaatggtgcccagattgaaacaggagtgtaagccacagccaccaagtgccagtgcccaggctaacacttttctccattaactctggaaaccttatttcctttttgtaccacgtatttacagtgtttggtagttatgaattgagtgaattatcccaaggttggagatatcttggtactcacttgtaagtggagaaacactaataggaaaatattctgggaatctggtaaggaagtatgagtgaatttatcatatttaacctttgttcaaatacattaagccctttcttccctttgtcattctcaaactggatcgacatgataggaggagaaattttatcaactaaaaggggttgtgtcaataagtgtttatgatacctctaaacttaggccttaaaacaacacaatctgtgatctgacagttctgtaggttagatgttcaacatgagtctcatctggctaaaaccatcatgttagcaaagctgcatttgtctctgaaggttctttctaggggagaatcccccttgctttttctgacttctaaaaactgaccacattccttgacttgtggccctctttttccatcctcaaagcctgtaacatagcacctctgaccatttttttcatagtcattctgtgtctggccccagctgggaaaagttctccaattggtaaggacctacttgattagatatgacccacctgaataacctcacatactcttcctatctcaaaactcttaacttaatcctatctgcaaagtccgttttgtcatatacagtagcatgttcataggtttcaagcatttggacatggtcctctttgggaggcattacgctgcctgtgacagtgctcttctgatacattttcagtgatcttctagacataacaatcctggtcctgggaacatgcatggcggggacctaaataagtctattttttaagaggccctaccctttgcatagattctaatcttggggtaaaggaaagtttgagatttcactccacctttttttttggtgctggtatttccactgtgggaaagatcattcggatttaacaaccacatgaagctcctggattatctggggcatgtttgctgattcccaaggaagcttgatctttttgatggagcacttgagctggtaagttattagaagctgagctataattttccttggcattggtcatttttgtctaatcttttatttttttgttttttttgttttgttttgttttgttttgagatggagtctcactgtgtcccccaggctggagtgcagtggtgcgatctcggctcactgcaacctccgcctcctgggttcaagcaattctcctccctaagccttcagagtagctgggactacaggcgtgcaccaccatgcccgggtaactttttgtattttcagtagagacagggtttcaccatgctggccaggctgatctcgaactcctgaccttgtgatccacccacctcagcctccaaaagtgctaggattacaggcatgagccaccgcgcctggcctgtctaatcttttatttaatgcatctaggctcctcctttcttccttcatggtttcctttttcctacttccctatctcgttttctttccttcttttcatttacagagaaatggtgttagaaatgaatgagaggagtgagcaaagaaagatgagggaaaaatagatgtgttaaggagtatacgcataaagaaaagaggccaggaggaaaagctgttcaccccgactcccatcctaatcttgcgtagtctttcgtttcctgagaatagttaggtcagaagttacagtagaaactttcatggaatacacaaaagggaattaagtaaggaaacttgtgaccgatgctatgggaaaggacatgtttgtcaaagcaataggttcttcctgagttagagaacaattatggttcccccatggaaatgtttatctgacgcaatgagaaccaggtcagacacaattcagaaatgaaatgaataaaattattctaagatctagatgggaggagacataagggattgtgttttgatagtcttaagggtgcacttacatttacatccccaaattccctcttccatgaaccactgtgcactgtacattgccacattaatgctaactgtgccaattagattaactaatattggtcaaaaaagaatatcctggccgggcgcagtggctcacgcctgtaatcccagcgctttgggaggccgaggcgggtcacggtgaaaccccgtctctactaaaaatacaacaattagctgggcgtggtggtgggcacctgtaatcccagctacttgggaggctgagacaggagaatcgcttgaacccgtgaggcggaggttgcagtgagccaagatcacaccactgtgttccagccctagcgacagagtgagactcttatcaaaaaaaaaaaaaaaaaaaagaatatcctaatgaagagaaaaatgacagaaatttctaagataactgtttcatatttcttcattaaattaaaatgaaaatacatcttcttagagtattggggtataaattaaactgaataataccagtgaaaatgctctttcaactataaagtattagagttgagaaagttctttttgtttgactattcattctgtcatctcaccttagtggtaatttcttctgcttggacaatagagcaaagttgggccagtaccactttggcaatgggcatcaaagtcgaagaatcccatgtgcaggtcgaactcagtgaaaaagggctggaactggctgctcctgcccgcttcctgccatagtcaggcccacatttgaactttattatttcgggggtaattaccttgtgtagtcgtaaattttaatccaagtctcatatgtgactgtggatgggtacagtctaaagggaacatttctttatttctctgctgcagagtgactacgtctacagtcaaaagttctcaacctatcttaggaatcttactttacttcaccaaaaacgtgtgtgtgtgtgtgtgtgtgtgtgtgtacatttatataccatacatgtacacgctagtatgctttagttaaaatacaaagcctctgtagaaaacagaagaattctgcaatacccctgaaaaataatttattttctacatgctatctcataaatctgtactaaaatcaattttgaaaaattaagccccccttctctaacatggtactctctctctttatttgaattgtttcatgcacttcaacaattatttctagtttcatttcttttcatgaggactttattccaagataattcaatttttgttgctactgtgcaatctttttgcttgttgttgttgatgtgtggttattgctagtttaaaggaaactcttgactttgcttgctcatatccaaacactttaccaaattcagttgttaacaaacttatattaacaacgttttcaggttcttcagtgattattaggctactgaagtgtttttgtggttgttttgttttgttttacttctattggaattcatgtggctgtttatattttgctagaaaattatgcattttgtcaagattgtctactgttgttactatgatataggcgtatttctcacttatactttttaaaatatctgtcttgtccatattcatagcttccttttgctttgactgtttttcctttttcctccttagtggaactttcctaagaagtgtgtatatgtgtgtgtgtggagtttgttttctaactcattacttttaacgtttgccttattattttatatatccttctttaagtttatttagttattcattgttgtagtatcttactctgaatgttcatttatatttctctgtctcttctgtttactaataaaaagcatttaaattgatgaaatgcctctccttgactttatctgcatcccatttggatatcttttaaaatttatcataaaggtgttataattcagtcattcttccacataagaattattcagaaacttatttctaaattatttttatcaaaaaatgttattctattttttaatttgaaagaatttaagtcttgaaatttattagtgacatgtaaattcctgactgagcattatgaaacttgtttagttcattgctgaatttggtattttgtcagctgggaacactaaatacccccacttaacttgctatttgtgaagctcagagtagcattggggttcctgtacactttggcaattgccccatggctaatttggccaacttccaattcctcagggagcaacaaagagttgtctcattgccacctgctattaactaaatgcttaggattcagtgtcctaggggtgactgggagacatgggaatggattattgtaacagcctgtggaacctccttccctggggaattttgagaacagcaaagaaccatctgtctgggctggttttaggagcagccctgcctgaaggcaggtgcacggattagatgacctgtgaagattgtcatccatcccaatgacttcaatggaaaggatgcatttgctgaatttgaaaagagtccaggaggaacactgataggtttggggagcatatggtcaagagcctgagggtattgagcccttcttgaaattggagacactcggtgtcaccccatgccctgaattccagaatgccataatctacacgtgaacccagcagtcattcacccttgaaaattatgtgcagatgtggttcacattggagtattcacgtcgttgttgatcataagcagaattcctttttaacacatagctcaactgatctatacccagaacatactgttgaccctgattcttctggttaagccggatctgcctgtataatacatcatttactgacccactgacattgagttttcttagcttgtttctcagtggttgttctgtgtttgtttcaggcaattaaatatgttgatgcatgtttcagaagagctctcctaattatatcaacaatagctttattatagttagaaaagacaaaatgctaaatgaattagccgggttaagtcacatttattgtgatttaattcttactgtatgtagtgtaatataaataaaataaaaattttattttattattattattattttttgagacgaagtcttgctctcatcccccaggctggagtgcaatggtgcgatctcagctcactgcaacctctgcctcctgggttcaagcaattctcctgcctcagcctcccgagtagctgggattacaggagcctgccaccgtgcccggctaatttttttgtatttttattagagatggggtttcaccatgttggctaggctggtcttgaactcctgacctcaggtgatccacccacctcagcctcccaaagtgctgggattacaggcatgagccactgtgcctggcctgtaataacatattttaaagttacagagaaagggcaatgtccccaaaatattttcatgatgatatgtcagacatatggagtttcaaactaacactgtggtaattgttgtgtgtctaaacaagtgacaacggggctgggcagcaaaactagacatgggagaagccaactgatccattgagctgtcccagcaagagttagtgggattatgatttatgaaagacctgtgtggacaaggtagtttggaggaactgaatggagggagtgaattaattagaagaatgagacaggactagccacaaacttctcctagaagtttaaactattttaaaaataagagttgtggctcatcaaaaaagtagtgttttcaaaaaacacagccccttcacttaaatgatacgcacagtccagatagactgcaaaacttaatgtttagaagctaacaactttttaaaaactttattgatctgatctgtactgagaacagattttctctgtgctttataataaaacataaagatcaatcacaaaataatttatcaataaattttaaaacaaaaattttaaagtgtatgtaaatatcatataaaattaagaaaaaatatgtaagaataatatttgcaatgactatgataagcaaagggttaacaactgtatgaaaattttcatgcaaatacaaatatcccaacagagaaagacaaggaatgtaaataattcttaagtagataaatacaaatggatatttaacttaaaaaaaattttattcacattagtatgaaaagaaaatttaaataattgaaatctagtttttcacttatgaaattagcaaagatttaggaaaagaaactactgtcatttgctgctggtaagaccgtaaattggcccaaaacttttagaaagttattttacaatatttctcaagaactttaaatgtctcatatctgtcaatccagacagatagatggatggatggatggatggataaatatcagatggatggatggatggatggatggatttatcagtaatagatacatagatggatagatagatagatacatagacatctatagagatatatgtttctatataaatatatatctatattatcctaaagaaatatatatttgaacaaaatctatttatgaaaatgttcactaatgcaaaacttataatggcaaatagaaagggaatctgctgaacaaaatattatcaatcccaaataatgagatattgccaaaacactatatttaaagaacttaagtgatttgggaaaatattatcttgtgagggcaaatacattaaatttgtatattcagtattgccaaatttatataaaaaaatgggtagaatttctttttaaaaaacaccttaaaatataaacggagtacttcccaataatcagattacatgtgattttattttcccccctaattttccttaattttcaagttccgtacaatgaacatgtgttattttcataagtataaaagacttttttataaaaagaaatatatagaactaattagccaaataggaaagtttctaagaacaagggaagaaatttgtgaatggagtggtgaagagatccttggactgagagctgggcaatgtggatactaacactggctctgtcacaaagaaacaaggagacttattgaggttctctcttctggctcaaagattttatgagccagtaatttatcaaagagcccatcctagtgtacccatgggcctgtcaaccctggtagacaggttagtagcccagatgaaatttcccgtggatgaattttagaactccgctccattgatcacccttttttgttgttgttgttcttttactcttctggaagagagctaagaaacttctgataccatccccctttcccactcgccctcagttgtgagatggaggcagcaaatattcagtgtgttctttttggtcttaagtagttctagactcagataccacctcagcaccaggctgagtttgggctggctttggctacggtttgctgctgaatgtatcagtgatggacttttgaatgtttaatagccttagggaatgtggcagtgtcccctacatagagaactgtagattctttagtccaccatttccaaccctgtgatttagattgtcattataagcatcacaggatgccctgagttgagaaaaatctgtgctgtttaaatggtctttaagcagcctttcctttctcctctttctcagctctattctgcttaggatatggcttatgccacttaatcaacatgctatcatatgctttctgcattccagacatatattgaaatatcttggttgttatagccatcttctcccacatacatcccctttctctcttcccctctacatttttttctgttacttgttatttttggtactgatgtgcttttatttgagtaggatattggaatgcaattgtcttcttagtccaccatcccctgacctgtcattattgaaaaacaaaattctgtagcaaatgagtccccgaaagtgttttttttcaaatgatgatgatcggtcacgttgtgaatctgtagactcctttgcgaaaacaacaataaacacagtattatttatggtggatatgctaggtacatccaaagctcttcatatgtgttgccttgtataatttcctcagcaactctaatttaatagaaactattgtccatgtatagatgaggtagtttatacccagataggttatacaaacctgtaagtaacagagccaaattttaaaggcagacaatgtaactgcagaaaccttgttcctaattgtttaatggaatatggtttagaattctgtgtggagaatcttactctaccctagtggtaaacttaaagctctttaatttactgtggttatattatatatgtgcaatggatccctattttcaaacatagtcgtttgataaagtgtgggctgcttttcatcacgaatgtaaaaagtctcttagttgctacacccagcaactaagtgtcctttaattcttaactttgaatacttaattggatccctggtgctatgtgtatttgatttttgttgtgaaagttgcattcactgtgtccctttatttgacatcagcaagatgtaatttctataaaccaattaatgatgcacctttcaactcttactatgagaatattagctggtgtaaatatcggactccttgtgaaggatgactcgctatctgattggtctttaaaaaaatactttaggaaataatggcttgcccctgcatataccaatttgaagtctttctaatatcagccattagctgggatccacatggagtacatagacaaatgaccatagtttctactgtaaaaatgcctcaagatcttgtaggtgagattaggcaattagataaatgcctatagcacaaaatgaattaacatgattgcttgaaaagaattaatttctgtaataatttgaagaaggaagaagttatgtatgctttggggggtatacagaaaggctttataaacaaccctatgaaaaaatggaccacagttttaaacgggcaatccacagaagggaaacactgcaatattcattggaaaaagaaaaggaaggaagggagtgaccaagagaagaaacaagaaggaaaggactgaaatcttgtttgcctttttggagaagatagcatttgaaatgggccttggataataaggtgtgattgtcgttggtggaaatgaattgcatccagaatgcagaaataactcaagcaaaggcatagagattggaaaacatggggcaggtagaaaacaagtccagagtctttgctgcttcttagaagatgtataagggttttattttatagttttataatgaagggcttttaatttcaagtgatgggtcagtgtataattccttaggagataaaattccagggaaaaggaggaggggttataagataaatctagaaatctaactcataaaaattagttcccttccagggagttagttactccaaaaatatccttgataagctaactctgcatggatataactgtgttatctgtgagctggctacagacaagaatttacaattgtctgtagttgcagtctttgagctgcagtcattcaatctctgtctactgctaaaagccagagtttggaaagagcccttatgcatgcttgataatgacacaatttgactgagaatactgccattttataataatctctgaaagttacttccttggtctactgaatctcatattttgtgaagttaaatgaccaatgactgtcattcattggccatgattgtcttgagtttgttgatactaaggtgttatttataatgtgccttttgtttctcaagaatatgttcgcagaaatcaccagtagtgttatccatgtgtatggaaggccagactgtatccccttatgtactaacagactgtatggcaagaagggagccaggttgtcaatgtgagagctaatgttgatatcaacacaggcatcagaaagtcaattactctgtttccctagtttactaaatggtgcttttgcaatagggaccatgttgcctaatgggctgtgaactttaatttgttcataacagtgccaatgagtaaatggatctacctgtggactttagagtgtacttctaacattttaggactgcaagaaagtagtgtgttttatcctctgatacattcatattctctattggagcatacctatccaagcccaatatcctacatcagttttaataaagagaaattacatttaattgtgtctctatcctttcatattaatccattatgaatattttattccacaatgttagaaaaattacattaacttattagtgaagaacattcttttataagaagtgctttatacttcagaacctcataacttactttaaatatttcaggcacaataactggtaagagatgaaaaataagcctgaactcatagggtaaggaccatttagaagtcttttgtcttcagcttgtgattgttcagttaaacttatttgatgtgtgctcagcaggttgtaaaattcctatctttctggagtgatccataagagattacttcatagtgaaacacttaagtttgattcttatgagttgcaaaatgattttccaccaggaaaaataaagaatatgggttccatcaaaagtcaggcatgaattctcatctcctgataaaatgtgaaatatctttgctgatcctgtgcctattctcagtttccatgaccatgcacaattattatttttagcaaataagcaaatttgaggcaaaaacattaatttgataagatatctgcaaatgcctttctggaggagaaaataaatttaaaaagcatcagtgtgtttcactgatatgcacaatcccccacttcttataagaaattaaaacactagtttttaatatcttcagagagaaaatgagtaaaggaagcacagtattttccgaaacgtgttatttaaactaaaaccatgaaatttatgaaaaaaaaaaaaagtagacccttccttgatacacttggtcccaccgaggttcaaagtttcctttgaattggggggggaagggagattctgtaatttaagttttaaacttctgtctttgtatctatccttgtgctggtactccgctatcttggttgctatggttttagagcaaatcttcatatcaggtggtctaagttctccaactttgttcctcttttccaaaattagttgaactattgtgcatcctttatatttccatatatattttagatgtggcttgtcaatttataccaataaaggattctgttgtacatgtaaaccaaattagggagaactgacactttaacaatattgtctttcaatgcatgaacatggtatatctctccctttacttcatttttttttttttggttctctcagcagtgtttttaattattattgtaaaggccttgcacatattatggaacaaacacatattatggaacaaataaatgtaaaagctaaatctataaaacttttccaagaaaagaaaagaattcttacaaccttagataggcaaatatttcttaaggagtatacaaaaaaccccacaaaccataaagttaaaaatgataaatttgattttataaaaactctaaaacttgttttttaaaagacaccataacaaatgaaatagcaagtcccatacagggagaaaatatgtgtacagtatgtgtatatgacaaagattttatgccagaatatagaaataattattaaaactcaagaagaagacaaagaatgcaatttaaaaacaggcaacagatttgaaaataggcaatagatttgaacaggtacttctctaagaaaatacacaaataaccaataagcaaatgaaaaatgctcaatatatgtagtcattaaagaaacaaaataaaactctgtaaggtacctccatacattgatgagagtggctaagactaacaataccaagcattagctaaaagacagagcaattgaaattctcatacactgcagttgaggatgtaacatggtactgccactttggaaaacagtttggtagtgtcttaaaaataaaacgtgttcaacatatgacccagcaattctcctccttgacattgacccaagtgaaatgaaaccttttttttacacaaaggcttgtacacaaatgttcatagcaactatatttataatggccaaaaactggaaacaacccaaatgttcattaacaggtgaaaggacaaattatgctatatttatacaatgaaagatgactcatcggtaataaataaatgatctgctaatatgcacaaatacatgaaaaaaatcttaaaaatatgatgctgaataaaaggaaccagagctacctccacccctaaaaaagactgcctaccttagaattatatatttacaaaatcctggaaaagacaaaactaatctatactgacacaaagcaatcagtggtttgctgaggctgggagtggggaaaggattgattataatggggactgacaaatagggaactttttggggtgatggaaatgttccagatcctggtaatggaggcagttacaaagtcttataaatgtattgaaattcatcaaagtgtacagttaaaatggttttatttattgcatttagattatacctcaacaaaggtggttttaataaataaacaagaaaaagtgtttttcaccaattggtttgaaattcggccaaggcatatttgagcgagggctgtcagccttgtatttgttgcaagtcacagtgagtatgtcctaatggatcctctacaaggtccaggttaggtttctttaaaggatggcaagaacctgaaacagtgtgagtgcagagaacagtgaaacagtgtgtgtacatagtgctttgatttttgtgcattttttggtcctaatattttaaagtttgctgaaccatacctcatagaacatttacctgctttttctgagggaaatatctttatagaacttttccaaagcattctgcatagattttattttaagaaattaaaacattttatttgtattaatttacataataattggttaactcacataattacaatgacaagatcatacagtaggagcagacttgggatcaaatgcagctgactctaatagcaggtgtagcaggaggcacacagctgaggggacatttgagacgaaattgaggccaggttccacttcacattgtactagggttaagcgtgtccacccagaggaagagaatccttaggcctaaaagagcaaaagtgtacagacatactcaagagtaagagagtagccaggaacaccagccaagccataaactccagtctgtgtgtgttaacagataaaattaagagggtaatctagggagtctattgctaaatgaagggcacattaagtctcaacagtattcctatgatcaatcaagcaaccaatgaagtgtacaagcagaagtgatttgtcatggaatttcagagccagaaagatccttaaaaaggcagtgtactccaacttcctctgaagcttgtgtcctacctacagaattcccaaccactctgcttgaatgtctccaaagaggaaaaaatttagaagagaagacaaggaaaattaatcacaagataggcaatgaataggcaagtggtaagaggccagttttcccatcctcatttactctaaatttgattcatagattattgagcctcagatatctgtttgccatctggtctggtcagtctggtttggcatgcgtcttctttctctttagagtttgatgacgttttaggctgtgaggggcatttgcattgtagtagaaattggatgatgtcagacttgctttatcacactttctcaataatctcttttggtgagtttgatattctacttacagctgctaaagctccttataaccatacgcacaaacatacacttccatatagtcatacatactcacaaacatatatacacagccatttacttacacacgtgtacacaaaggtgtatatccacacacttacatgcacaatgagagatgcatagtaagaatttttccactacccctagtttaactggaagctgtagaaaatctgaactttattatattgatctctgggatcatccacaaaattgcccaaaatgggaatgcggaagctgtttcttacctttcattttctccacatccaatgtgtcctcttcaactgtgtattttgaaacaacctttgaatctgtccccttcccgcaactgcactgccaactgctgatatcattttttgcaaacaagtgtaatgaaaagagcatattctttaacatcaagcaaactaaggtgcaaattttagctctgcatgtattcattgtgctatcttggacaagttatttaactatcctgagcctccttgtcttaatgtgcagatagaagaagataatgcctacctgataggtggcataggaaaaggtcaaaaacattattttctactcccattgctccccttgcctgaaacattataatggccaaacaactggcctcccaacctcctttcccctcttcagtttttcctctacattatagctagagattttgctaaaatgtatatatggtcatcccattttttacttgaaactggtatcttcctgcctataaaacacattttgtttcttagtctcacataggaaatcctttttagtctgtcttgggcccaggactccagtccgattttcctcccattcctacctgccctcttggttttgaatgttccacacaacttcattcctttctctgttaattggcttttcctttacttagaatgctttcccccttcctgctttttagggagaacagggtaaactgttctccctatccttcattgagtctcctttcttttttctaaagttttttcttatcagcatccctcccccaatttgagctcattttctagaaagaattaatagctttcttatatgactctcaagatatttctgtgtggttctctaacagccttcatttattttatatggtaattatagatgtccatttgttctagggaaggcaggtgtcaggtcttactcatctttatattcctggtttgacatacagtgcctgatgtctagtaagcacttgatatctgtttattttaatgtttatgccctacattatctatcacaagtattaaagattgataggtgctctgtaaatgttaaattgagttaattattttcaatcttacaggaagttacataagtcattcctgtattcatttgtgaattttcgacatcctatattaagagttgcacttagaatgtgagttccatgagggcaacagcacttctgtcttactgctctgtctgctatgttggcccataattaaccactcagtaagccttttgtgaaaacaacctcaatgagtcttctacctcaagtcttttgaataggaatggatttaaagctgacccctaatacatctttcaaactttaagtcagtaaattttttacaaacttttttaagttgataaatccctcagaaattattctgaggaagctgatgggatagaaatgaaacagactaaggggctccaggcaatcaccactccccttcgttctccttcctctgttggtggggatcaatagagcaggatcctcaaaactgtggagttctttggagcatactttgaaagcctctaattctattccacgctctaatttccaaaagagggaactgaggcccgtggtggttaaatgccctttccgaggttacacagctatacatggtagagccgacccatgtcttctgactctcatcccgttgcacttacaactagcctgcatgttccccttttcccatatcgcatggatagcatcttacgcatctaagtttttttctttaataatgatcttctcttttctttaagagacaccatcactccgagttgtaccacttgcaccaggctaaattattcctcagtgtttacccctttcagatatttatagaccatcattatggcactccctagtcacctgtcagcttcctaatatgtacatatatggtttctttaatctttctgtacagtcggcttctctagtcccttaatcatttgtaccattctctctctaatgcctataagggaactgtttaaatatagtccatatgggaaaagtaacctcaacatgttgtaacagggggcagaaaaacacgctgaatagatgaaaggaacaatctacaggttaattagtagtatggccacaaatatgtgcacagttttgtttcagaaataaagcaagctgtatttgttgtaactatctcttctttgaacttaacagaatgctgataatgccaagctgtgtttacagtccaaatttttgctgaagaccttcaactttgcactctccctgtgtggtatctcttgcccaagacagaacttcaaataaaatcacatagctgatgcaagaaaccgttactgagcgtatccatttttatgcagtttctgtggacttacatggtttctgggagctccctataagccttagtaagggaaagctcttgacttatctcactagttattagggatttggatatatgtttactaaatgtgataatctaagtatggaaactacattagtacaagaggaatcacccagaaatactctactggcataaataaaacattacctattgcccagttttctcatttgtttcattttgtaacttttataatgtgtcaataagtttgaagtcttgaagggctgcccagaaaccaccacagagtggattttccttaccctcaatctgccttcatcaaaatttagtttgtgtgtttatcctataaaatttatctcataataaaaactgaagactaggacggtccttagaaaaacacttgattcggtgtatttattttataaaagggagtcacagagagaaaatgtggccagctcaggtacatggcttcctaggcaatgttccatttcgcaaaactttcattggtccagaaagtgtaccttcattcccaaccaaatccttcctataatgctttccatgcctttcttctgtggctctctctgatgatctcacaggtctataagctcttacaggtagaaatatgatttcttgctgtgttcttattataaagcattgccatgcaactgagaagtaatgagagccagtggattttattagaatggaattttaacttttctactttaaaacccagtgattctgctagtctggaggtagcaaagaaggatgactattttctctctcacacaaagtaagattctgaaggggcttattctctgaatgaaaaacgagaggagaaaagtaagaaccttctaatgttttattcaaatgttaacaaagaaatttgagaagcatgtttccttaaaattgacaccatttttatcccaaacattctggtaagtgatagcagatgactgtgcaagcttctatggagagagagagaggaatttttccaggagcatagtcccagtgggaagtattacctaaaagtaatacactaatcactttcaatcttgcatatttccacatactgtgtgcacacatatgtgtattaataactgttccctagacgtcacttcagcgctcagacagcttagtgttgctatgcgaatgctggagatggaatcagatgcagactacagtttagcaatgagaattcttcagagatacaagaatggaaatggccttaggtcctgcctcatgggtctccctctgagctccagtgtaacatcgggtgtcaagtatttgtggccccatctgcccactccactgagaatctaaatggcattgccagtatttgtgaggtactcatatcttaaaagtcagtgtactcaaatcagtcttgcattctaccttgtggattttgcatggaaattttttagaatgtcattgctgatggaagccccagatatataagtacatctgctccatcgtactggtgatttttatagatattcataagaaaatttattttacagcagtttattttagaggaattctttgcattttatttgtatgtgtgtatacttattttactggcaggatacacacacatgtatatacacacacacacatacatatatacacatacatacatatatatatgaatgtatgtttgtatcctgtcagtaatactttgaggtacctagggctgagattactatttctcttccacctatggctcaaatgggtaaaatagcttactcaaagtcacagttcatacatgtggtgcagcttgaatcaaaactcaattcttctatccacagatttaccactacttgagtagtctgtggtgtttaaaaaaaataataaacaacaggccgggcacagcggctcacacctgtaatcccagcactttgggaggctgaggcaggtggatcacaaggtcaggagtttgagatcagcctggctaacatagtgaaaccccgtttctactaaaaatacaaaaaattagctgggcatggtgacgtgcgcctgtaatcccagctactcgggaggctgaggcaggagaatcacttgaacccgggaggcagaggttgctgtgagccaagattgtgccgttgcactccagcttgggcaacaagagcaaaactctgtctcaaagtaataataataataagacgaagaagtaacaaagccaaactggaaagtttctgttaaatgaatgttctagataataccaacgtataaagcaatcattttataccagctatggtcaaacagggaccagagccttgacttttttttgcctcaacacagctctgcagaacccactcagtaccccatgtcctactgccattcctttggtttccagaacattgagatgtacaaatccaaaacaccacagtgtttcagagagaaatggcatgactctactggttgcaattgtaatggagttcaccttgttctggagtcatacagaagccatgttgtagacttagtgtcccacgcaatactcctaattacaatgaaaatctactgttaggtagaaggagaaattcctcacaatcaggcaacagcgcctactagtgggaagaaactgatacttgaggtagggcacctgggagatagctctgtgcatcttgagagagtgctacactgagagcccaaaggctctcaggtctcatctctcctgacagcttgctatgacatcttaatcaatgaattgcctctctcttaccctttgttatagagtctgtaaatgaagagtttggaatggctactttctaaattttctacacgtcctatgacccttgaaatcctcttaacaatgtattatggatactttgctactaaacggtaaaacagaatcccgagtaagatgaattggcttcctaaggaagtagtgtcaggggagaatagcaccatctttggggccagttccatttatgcaggtaatatggtatggtccagctcaaagatcactggactgggctgagttgcaactctgctacctacttctcaagtcatgtacaaggtcattcctatgttaactcatgtgttgggaagatgataattgtctcatttagcttttagttattataagattcatatgagaatatagaaattatgaagttttatgtgaatctgcaaatttattttcagtctttatatatcacaattttaatttaggctaattataatttttattttcccctttttgttctatattctaaattcgtatctcccatggaggcaggtactgtatggacaaaatcttttattagtcacatattgttttcatccattttgtgctgctatagcagaataactgagactgggtaatttataaagaatgaaaatttattttatcacggttctagaggctggtaagtccaagatcaaggcaccagcaggcttggttttctggtgagggctactctctgtttccaggatggtgctttgtgctacctcctcacatggcagacagtggaagagcaagccagcagaatgccgcatgaagcctctttcacaaagggctttatcccattcatgacagagaagcccgtatggcctgatcaacactttttaataaaatcacaatatctactgctgaattttggagggaaccaattcaaatcatagcacacatcttttctaaaatggaaagggtaatatgatcattggagaaatactcattcctttgcatattggtttactatccaagccaggtgtggtggttcacacttgtaattccagcactttgggaggccgagatgggtggatcacctgatgtcaggagtttgagactagcctggccaacatggtgaaaccccatctctactacaaatatcaaaaaattagccagccatggtggcacacacctgtaatcccagctactcaggaggctggggccagagaattgcttgaacctgggaggcagaggttgcagtgagccaagatcgcaccactgcactccaacctgggcaaccgagtgagactccatctcaaaaaataaaaaaaaaagtttactatccagagaatcttgtccaggttaacactcttttttgtctgctttcttcttttgtgaaacaagaaggtaagagggacactggagaaaacctaatgttctttacaaaatgagtcatagttctccatctgcaaactgtggctcccatttatgtcttggtgtcaatatgactattacatgttatgtacatggattccacctcatttgcaacatagtcttctgcctgagctctgtttgttggatctgatctaactttacatggtcttaagtcacacattgaactcttaagttctgtaggcctctaagcctttttaagttttagtattttcatcgttaaaatgagagtgattataacccttgctttgctgcctccaaatattattgagggatcaaatgcattgataaataagataaagcactagacaaatataagggatgcttgatgacttcacagagggaagattattctgttgctggctgctgaaatacagtagctttagaaaaacccctttgggttcccttattatcaggtttggtctcaaataaccagaataaatttggagatttcctaccacaaaagctaaaagtacctgggcagatttaccctttgagtggacctaagggaaatgcagattcccacgggagagatcacggagcagattcaaaccataaggcaaaaataattgttgcaatagcggttctaactgtactagtaaatattgatttttctgttagcagatcaatcatgaaatgaattctaaatatagaagactggttaaaaaattaagacggagaatgtgaaaatgtccatgtgtaaaaattaacttaaagagaaatcttgctttggccaaaagaaatactactgtttctgtcaggaatgttctgtgatttaatcaagtttcctgcctggccagataattttaggaattgtggacttttaaagtagtaagtcagtttagaaaactggttaagtggacagatgtaaagtcagactgcctaagccccaattccagcttcaatatttaactctgtggttgtgggcaaggcacataatctctttatgctgccttttcatcaactgttatggagataatgatagaacctacatcatagagttgttggggtgactacatgagataatacaattaaatacttaacacctggtccataaaaagcgctgaataaatattgactattatcatcaccccggggtctacaaatttttgtaggattaggattaggattgaaatttctaccgaaaaattccatcagtaaaatattgataaatataaatcttaaccaactgcctcagagacatagggacctctattttccactcattgactgtcatctttagagaacagtccaaagcatgtgcctttctgttctagttgttatgagctctttattttgaagttgaactatatacttcctatagtttaaaggagaaagaagtaggtctcatgctggacaccttctagatgttacctcctccgaatttcatagccaagtatttaaggcagttatgatcatctccctcttagagaagcctagaaaaggttactgcagtgcttgacagcaaatagaaactcaccaagtgcatttgttgagggattgacagaatggctggataagtgactcaactaagaccacttatctagtgagtgcgtctactcagctgcttgttttgaagacaaggaaattcgggctcagaaaatttaggaaacttgtctaggctgccaatagctagtaacaaaggcaagaattgcatatctgattttctttacaccatgttacatctaactgttcaaaagataaccatgtattatactcgaaaatgcaaaacagggttgttttttgttttgtttgttgtggtggtggtgatggtatttttgttttgtttttgctacttttcctgagagtggaagttgttatcaaaaagttactgtcatgactactatgtgtatagatgctattagtttcatcaaggttgggaatagggtatatgttgcccaactttctgcccctctccgcctcatattaaagttccagtttcctagaatatatctcctgggagatttggcactagccatcactgcattccaataccccgggacaaactactcttggtggaacacagaagcatacagtccttgttacagcagtggttctcaaactcacattcctgatggaaagctagagttgaagggtcaacacccaagagctgcagtggaggaccatcacctgtcctgattcgccacctgtggtagatcatgactttcactaagatcccctgaggcttgtggggatggagaagtgatgctggactggcccttcctctttccctgcaggtgttaatgggttctgctcctaaacaatactgatataggtcagagttatgattgaattgtatacatagaaacatgtgctgattgagaaaatgggctttacaagtcagacctggttccagtctcagccacactacattctgcctttgagactttggccaggtgatggaacatcaggtttcttatctaaaaaggagaataattggttggtaggactaaatgaaaaaatgtatgtgaaatgcttaggacagtgctgagcacagataaaaatgcacaataattttctattttttgttagtttccttcacaatacatatatttacatcagcgaaacatgcttgcttttgcaaccttctgtgggactccccctcctaatttaccacctcacctgaaggtctaagctaagcaaatctctgtctataaatgaatcacatcgtggttagactttataacaacttccccttgccaggagatcactcagccttcacttcatctcatctggtttgctgcccaggcctttatccactcattcctgaactcctctccctgacaaccttggggttttggcttgttgtgtgcgtgtgtgtgtgtgtgtgtgtgtgtgtgtgtgtgtgttttgttttttgtttttttttactttaccttaatttctctttttggactaagatgttaaaatgtttcttaatgtgactgtctccgaaactgttttgtgtctaccactcatcctagtggcagtcattgatccttttcttgttgcgagtgtttgagtgtgggtgtgtgtgagtgtgtatatgtatttgtagagggaaaaacaagagagagggaaacagacattggagccacctttcccccactagccacgtacctgttgaaccttcaagcctctctatagaatcagatatacacaagcacagtgacagaactacatgtgtcctacagtccagcttttaagatatgataaaaactcttgtattcacagagctaaatggcaataaccataggagattgcatattgctacattatgtaaagacagagtcccaagaaaatagtgagaactcagtttgatgtatgatgtgatatgtgatatcttactttacatggctaacagttgacattctttgtggattctatattgtctaaggctacagaagagccatatgataaattcatcggcaacccaaaagaagcctgttctatcgcagtgcttccaattaatataagtaaaccactttctctggctcaatgctaccaaaatattttatgagaaaatttagctgattctgctcatgtatattttcaatggatggaaagccattgcaaacttttcaaactaaaatataaagatagcattagggagaatactctctctggtgaaaaacaacatgtattatgatgcgttaggaatttctttttttcagccaactcgtggttgagcagtctgtccccaaactgttttgcatgcggacgaaacctgtttgggcgatacttgtcagcttttcttctgacaagcaggacagaaataggcacccccagaacactgagtttgacttgactcaacatagaatcacctggagagttttaaaagtttctctcctgtaatatcccacctccagaccaatgaaatcagaatctttggagttgggaaccagggatcaatatttttttttttaagtttcccagatgattgcaatatacaggcaagattgagagtcactgtcctagagtataagcagtttaagaaacaagttgtctattattacatgcatcaatactacagagtccatgaaataaaagctttggtgataagaaaatgccaccatcctagagccttcagttaacatcatatgggcctgtcatataaagaatgcaaactcattctgttatctttttgggccttcagtggaagataatttttaaatcagcttaatggaaactgtgcttcaggaaaataacttcagtagccatatgtaggataaactggagcaggttttgtttctaggaatatgttgccatcatttcactacccttatataatcttattgattcaacttttagaaccaagactttttgcagaatatatcgaagaatgtgcttaatgggaatgctgatatatcatacaattggcatatagagcttcagttcattatcatatttaaaggtacaatattaattttgcttgtgcttaaaatgtctattataattcaagtagcaaggaagacataaagaaaaatgtgacctggctttacatctgcacatatttaatactttacatttgatggtgaataatgggaaagtttgggagtatgtcatgctcagtcaccatgcatcaactcccaaaatggctgtggacagctttggtcctgcctcaaaacaagcactgcttgcaaaagagggtctgtggcttatttttatcagttgtgtggtgatcacaggaaaaacattttaaataaaaagtttattttgccatcatgaaagaaacaaattcatattaccaaaagagaaaataaatatgacaacccagcctggtgcagtggttcatgactataatcccggcacctcaggaggccaaggttggagggttgcatgatcccaggagcttgagaccagcctgggaagcacagcaagaccctatctgtacaggaaaatattaaaaattagctgggcttggtggcgtgtgcctatagtcccagctactggtggcaagggctgagggaggaggatcacttgagcccaggagttcaagggtgtagtgaaccatgatcgcactactgccctccagcctgggcaacagagtgagatcctgtcacaaaaaaaaaaaaaaaaaaaaaaaaaaaaaaaaaaaaaaaaaaaaaaaaaaaaaaaacaaagaaaagaaaacccatatcacgctatgccacttctcttgttcaacctgtagatttccctggaatgccactattcacccatgccatccccaaaaatgacttgttaaaattctaactcttcagattagctccattattaagacttctgtaaagtctttctgttggtaagaggaggtaaatcagagatatcagaacaatcaggaagccattgcaatagcctttgaaaggaagggtgattaggtagtaggcatgtggtggaaagcaggcatttctgacacattgctgaggttgctatagatgggagagcagaggtgaaggataagaagaattgttggctgaatctagagtcagtacaaagcaatatataaaataagtaataatatataaacaccatttttggttttgtttggaaatcttaattcactgacaaagttccccatcggctgccggccctctgtcatcggatcttttgattgactgactgctcagcattggcagcaagctcttcacaccagccctgggtctgagctaatcagctgtgtttccttcatgctctgatgccttgaagtttggtactattctcctggtttctcttgtttaaaagtgctgagatacttgtctaaaagatgggccttaagattgtggtgtgcttttaataatgtgtggggtaagtgcctctagaggcaagcatacactatgcttgagtaactttctctccattctgaatctctccctaaaggacacagtttgtaaatgtttgttcatgtgaaaagggaagattcaggtaccttttctgtcctactgatgtgtggggctatttttatgttttgttcttcacttttttctgtacttgtgatttaaaggtgccagactggttaccctcaaggctagtgtccccactgtatcccaagaatagaaaaaataatgagaggcagcaaaactggcctgtgtctgagtccagcatattaggctgacccactctagaggaatattctccaaagcataaagtagaagatcattccttaggaatacaatacagtccatctgttttcatagctgagaaggcaattccgtgtcatgccatcatggagccactgcagtgttttggtatccaagccatagtcactcattctctccgtgagggaaaactagaatgtcttttcctcttccacctttacctttcaaaattccatccttgaaggttcggctcaaatgcttctttctccacacaacctttcctgagcccctgtgagtgtggttttccttccacattccatagcactttcttctaagacgtgttacatgctttgccatgtgactattgcatgtaggttgtcttgactgtgagaggcactgacatcgtgacatcgtcgaattcatttttgtatatcacacagaaggagaacatagtcgtgggcaagagtagatatttgaggttgaatagatggaccatttcaaagcttatcttttcagcctgacctttaaggctttgctctggccgttccctctaaatcagtgattgaagtttgctcccagatcctcatgagtagctatcaaactctccataagccatgtaggctcaggttcttggattccaggtattacacttcgggcatcatagtctgaatcaaaattgctacttttagctgcttagtagactgccattaccaatagtttaatgagaactacttttttaggggacggggggaagtgtggtccacagatccctgatagcccttcgtgtactatgtagtgaatctgcttgacatctagaaaagggaagagtaatatagaaaaagaattttgttgacctgcctgcatttaacaaatgtaaaatgtaaaattacagctttcacaggaatctaatatgcttttaataatcatatggattggtaatccatttactcctaatccctaattcgttttctgcaatgaaatgttgtcaaagggtggcatgaagctgttagaatttaagcatgattttcaaacatagcacattttttttgtggttttgtttttttggttttttttttttttttttttcagaataatttcaaaaatagtgccatatgaaatagttttgttactgttggcaggaaagtccaaaatgttatctcataataaaaacaggtacaagttcagtcttggataaaaacttttgaagtctgccacaaacaaatactatacaaaattttttcatcaaatgtcaagactgtggtatcaagactttataatgatatcaactgtagtggtgacagcttagtttccaatactttaactctttttccagcacttcatatttctttttggtttgagatgaagtctcgctctgtcacccagctggagtgcagtggcgccatctcagctcactgcaacctctgcctcccgggttcaagcgattctcctgcctcagcctcctgagtagctgtggttacaggcacacaccaccacgcccagctattttttgtatttttcatagagatggggtttcaccatgttgaccaggctggtcttgaactcctgacctcaggtgatccacccacctcggcctcccaaagtgctgggattgaagacatgagccactgcacccagccttcatatttcttattccttaggaaaaaaactaagatgtatactttgggttatatttaaagtcacattcaaatcccacaacaggatataaagaaatacttttcagggccaaatacaactggagaggattagaaataaatttacctttttttctctcacgttgaaacatctagccctcccatgtttgagtgtgaaatggctgtcaatccaatgtgatggagtgctgaaagccgtcttcagtgagaagtctctccataatgctccctaacatcagatccatgttaatcctgatgcacagaactgggaataggtaatatagcatagtgtttaagagcacagatgctgaagttagactgcttaggctggaatttagttaaccatttgtgtgactcagtttcctcatctgtgaaataggcataataacagtacctgcatatagactgttgtgaatatgaaatgagttaatatatctaaagcccctagaaaaagtctgacatatgtgaagcactacatttgctataccttatctatcaaagcctacagcttctggctaacattcccagtgttctataattattagatagaattttttttaacttagtagaaacaaagactaagaagggaaactagatgtggacgtgacgtctagctcaagattcccatgatggagccacatagagatatggatggcaaccagcataatgcctctcactgacataactatttgtctgaatttatattttattgttattatttaaagcttactgcaaattttaaaaactgaaacctgatgtccatatgtaggccagatgccacattaatcaatttaagaatgctggagcttcgcagaatactgcatgaacaacgagaaccgtggccctgaaagactcaaaaccctacagtatatgaaactattgcaggatgtgtggatgttcaaaggaataacagacttggaagcaatgcttactgaattttgatgtattaaaggatgtcaagtccaagagagagataaggtctcagaagacagaactagaaccatggggtaagcagttagaatgaggaagcactatggctcagtaggagaaagaaccttttagccatcaaagcgatctagaaattaaaggactgccttgggatctgcctgtcactgagagctggctgcagaggttttacaatcagggcttttgtaaaaggaactaaaatttgagtttggacccaattatcttacattctaactggatgtgtagaatctccaagaagaaagactcttctgtactgttttatagattttgccttccactccaaacatcctgagtcatgttccttttatacttgcatgtgagatgagagtcagagcactgacctcaaagccagcgaccgggttctactgttcctttctgcaagaacttagactatgagactcaatcccctcaaccgattaatgtaaaatcccctccatgccaatcttgcagaggataggggtggctgtactggtgatcttgctggggtaatggggtaatagtactggggtaatgacggcaggagtggtggttctattgctgctgacgttatgaacctgctttctcctccactttggctttagcaggactgaagtactccttggtgtgttcttatcaaacccttttttttccaggccgctgtgctcgctgtggagaaaacgtagttggggaaggtacaggatgcactgccatggatcaggtcttccacgtggattgttttacctgcatcatctgcaacaacaagctccgagggcagccattctatgctgtggaaaagaaagcatactgcgagccctgctacattgtaagttccagatttgttcctcaagcactttgcaaagatgtcttctgtggctgaatgccagtcactctagatagaatatagccatcagatctttgcttcttcctagacttcaaaatgtgtgtgtggggtgtgtgtgtgtgtgtgtgtgtgtgtgcgtgcgcgcatgtaaattagcatattgtaatttttttctacacatcccccattcataagcagtcagaaaggtgtattagcatgggactgccattcagttagtggtctgctgggaagatcatcagcctgtggctttctagcatgtatgtacaagctaaaattttctttcttaaagcatcagaaagctttccaagtagctgagtcacacctcttataagatctcaccctacatttgaagtgcccagtagtttcaaggaaactttacagaatctctggacttgtcagtcctcttccagaatactgggccctttgagtccatttttatctaccaaaatgtttcttccccctcttatccaacaggtttttaatgatgcaaacaggggaactgtttattataaagcaccttaaagagaaatgaacagtaatgctgactgagctaatcattgttttcttttattacagaacacaaaaactatattttaataatatacctgggtaactaaaaaattctcagtcatgttaccttagcgttttacaatgctacttacttaatctacctgttaaactattctctggtagagtaatttgatgaatgaacacagacttttttcatctattgtaaatttctttgctatccttcagcatgattttaatctttgtttaacacatgttgatgggaaaagtagtgttttttgtttgtttgttatgtaaacccacaaaacagtcatggtttgtccctcagtgcccagagatttcaacataaaagacaccttggtttctttaccaaggtattgggagtcatacttggctttacaaggttcacatttattgaagacgtttttggcctggttggtattttcctataacttggcagctctaacccattgtaaccttggggtctgtagcacagatctgaaagttcatcaagattaaggcttcgtaggattaaatatggctttgcatctgtcttaggttcaattttatttcgttttctttccaaaggtaacttaatacatgtaacatcatttctttccaaaggtagcttaaacacatgtagagccatacagtggtagagttggaaaaaaaatcttaaaatcatttgcgtaattactctctttagcaatgagaatgccaagacatacagaagaggaaagcgacttcgtatgacctatcattagtgtcagaaccaaggctgcattccgttattcacgctccacagtcttagattctttgcagatgctacatggttttcattttcctaaacataaagataaacaaagtaatgtactgttgatctggaaggagcaattatgcataagcgaaagtctagtaaacaaaagcttacctctttagaatataagaatatttcaaatatctttgaaatctttattgaaaaaagaaaggcattacataattccttgcctttttaaacagactaaaccgggtgtcattcacaatggcttggcaccacgtttatgaaattatttattgccacgagccctaaggtagtgatgttggcagagtgtgtagaggcacccagggttgtccttacaccaagtaaacacatactgctgtgtttttttatagctcctgtctattttttatccctttttgactccatagttgatttttgctactttaatgatgctactgtggcagcagccttcttcagttgttttgtttcaacccttgttagcttgaaatcatatagacagtattgggaaacagtgtaacagggtgggaagaacatgaatttgaatttcgttacgtcacttagtgcctcccctccttgggaaaattatttactctttctaagtatcagttgcctcatctatataatggggacgatggcagttattttccatgaagaagaaatgagacaatcctagtaaagcacactgggcctcttcaggaaaagtagtggaataaatgttattctgggattaactttaatgatgtttctgaaactgtttaatatttctgaatgtgggaaccttacatgtgcagtgaaattcactgggctttaggaaattattataacctttcagacatactcctcgcatttttacatgtttgcttgcttttctgagtgcgtaacaaaactggagaaggtctaatctgattaaataataggtttctacagtgtgtgggctcaagtttctatctccattccaggcatagtatgggtctctgtgattctgtaggatgccagccccttcttctttggtttgttgttactatactatgcttatgagaaggaaaactatccgggagatatttaatcgcgtacttggaagaactgggtgaattcaaataatggaaattctaaccatttttttttttttacttctttccctcataagaacatttaatcaaggtttttctttaatgagatctattcgtggtgactctaaaatgtaatttaattcttatcagaattcagttaagctttaccaaagacccttgttcaatattgattcgagttcagcacagtcctcaagccctcagatggatgtatcagaactttaatttcttctgaacttttatatgtccaataagctgcatactagaagtgtaaggaggttgaggaaattgggcaaatgaaataaaacaagttggctttgaagatagtttgcattaaggagaatcctagaactatgcgtctctcttggaaccaaaagccttagaacaggaagcatattctgtgtgatccagcaaaattgcctttggttacactgttgaaaactgatgtctaaaaggtattccatacaaaccagagcaaacctagcccttggccatcagtcagtgtgcctgtcttttttttttttttaattgatggaatgagaatattcaagatagtggcttaattatttttgtataaggaccagcatgtttgatactctgagttcaggaatgagaccagtctaatgtaaattaaatttacttctgcctaaattggttgttgatcaacttaagatcctattaaaattaaaaatttacatgattttgagggaaaatgcaccagtaatgtctgcagctttggttcaatgatttttaatattttcctgtggtttattgagtttgttcttaatctttgtgcttaagtagttatgattaaacagtttgattcagtatagcattgtaattctctttaatcattttacatattttgttttctattttttatttattaacataatacaaatgttcatatagttttgcattgttagtattcatttttagatttttatctgtttagttttacatttagattacacacttcattttaaaaccatttgccagtcaaaatgtattgtgtgttttgcaatcttttagaattgtaaataacatgcctatagatagttaataaaaattttattttttattttgaattacatccttagcataaattctttgatttatattaccaaatcaaatttaatctggaggacttttgcattaccttgctagatttctttagaaatatttttctaatttacagaaccatcaacaataatgaaactatatgttaaaatgcaaactatcccctatggcagaagtttatttatattttctgaactaatttaataagcacattatgtcttagttattttaagtttgtgtaattattagcaaaatcaatgagatgcttttcttctttggtgatatgtctcttgaaagcctagttttggttattcttatagatttgaatatgtaaacagattaaagtaaagatcactaaaactttgttaggaagtgatataaatagaatgtatttatcctaattctagctctcctggtgtgaccttgggtaaatcatttagcttctgagtatcagtgtcctcatttactaaagggagatattaatttctcccatgtcttcacagataaggaataagcagttgtgatattttgtatacatgaaattatttactaatataagtgcttaatctgattaacagaatttttatcattgctttttttttcccctttagtataatgtgatacactatagaaaccctctaaatctggggcaatttcttggctgtagttgctatggaaatactgaaataaataaatgtcatggaaggaatataaggacacatattaaaagcggaggttcatgctttgcttaagaagatttttatgttggtatgaatatgaagggcagcaacagtgcctcctgcttatgtacccttctgcacataaagagacagccttactcataagtatagttttagaaaaagaattgctgttttattcctagcattaccaaggagtctgggcctagggacagagtgcatcagaaattctcagcaaaagtctatttatgaagtggcagccaaggatcctcccccaaaccagtgcttttattcccagtggatggactccaggtcctaactctctgacagcagaaggtggtacagacatttttactagagttgaaatccaaatgactaaagggcctctggaaataggaggccaactccacaggaggctaaacactttaaggtacctgaaacttggcgcattagtgaccaacacactagcagccttttgctcccttatgtcatcaaatggctacagttaaaacattctaacttgtcagcctacattaagaggtagttttgtacctctgcaggaaagctgttcttttatatactcaattcttcttaataaaatgttttaaaagcacttatggccagtgctttatgtggatgttggaaaaggaagcaagagtttggactaaacctgaaaaatccacatgaactttcttcctttttttctaattgcctacgtctgctctctcacctccaaggagtgtttgtctgtgcctcttgtctctctttctgtctcacacaacacacacacacacacacacacacacacacacacacacacactttcttcttgctgttacatcatcatttcaccagaactctcctaggaaggagaaaaatggttcaagaaagagaaaaatttgtcaagcactctcttgggaagttaagcatgttacccactgggaatagttatctcttccattcatacagccccttacattttataatgctaccgagcatctgttgttgcatgctgtcatacctagtagagccttgtgaaatagatcatggggagattattagtctcattttacaaatgtggctcggatgttttcaaagtaaatgacaaaacaaagactatgaataacttttataatttacactttattgcttggcccatactaacatccgtgctaacattcagcaactaattttttttttcttttttgagatgtggtcttgctgttgttgcccaggctgaactcaaactcctgggataaaatgatcttcctgcctcagcctcgcaagtagctaggactacaggcttgcaccaccacgtgcaacgtgcaacttaatgttcaactcttttttttttttttttttttttttttggagacagggtctctctctgtcgcccaggctggagtgcagtggtatgatcttggctcactgcaatctccacctcccggattcaagcaattctcctgccttagcctcctgagtagctgggattacaggcgcccaccaccacgcccggctaatttttttattttttcatagagacggggtttaaccatgttggccaggctggtctcaaactcctgacctcaggttatccactgccttggcctcccaaagtgcttggattacaggcatgagccatcacacccagcccatgttaaattttctacgtgaagatcctaaaagcccccaactactcagatttaaaatcaggtataattatagccttttcccagaaaattttaattgataaccacctgactcatgctttccagtatcacagaacctgaaatgctaaacttctactgatgaaaaaccataagcccttgtattttcttgagcatttgaggccttaaaaagcaaaaaaaaaaggttaaaaatatttataacaactgacattgacattaacatttgctcagtgctttaacttttatgaagcacttttcttttatcatattaccctctaattaatgatcctagaaaatagttacagttatttttgccttcatttccagtggcaagaaactgaatcttagaaagtgtcagcttgcttagttccatagagtatgagtgtcagagctaatacttgaccctgggcctctgattcccaaggccggctatctctacatctaacagaaaacactggaaatcccatttgctgttgctaggttacctttttcccatgatggtaattcttttttaaaatcctaagtttttcattaatgtacgcccattagagaaaaattagcaaatagaagaagaaaggtatgtaattctctcatctcagtataatagttcacattttgtcatgcacttcttttctgttatgtttacctgtgggtatggaaggatgtatacaaatgtaaccacacatctgtatacatgtggttacatacacacacacacaatgagatcataccttaactattggttagtaccttgcttttgttacataacagtatatcaaactttgccttctatacagtccgttttaaatattcttgaaccactgaaaaagaatatatgtcacctacatatgctttctgaaggttgattcaaggatattttccaaaaggcaaataaagtaatcaaaataatatgcacaagagatgcatagcaaataaaatggtgaaaagcaatgaagtaataaaactactggtaaaaaaataaaggggcaaagatgtagtagtaaactcagaccaaaataagataatattaattacctactaactacaatattcatagaagaaaagtaccattcagtacaaaggtatcaagcagtctgaagaacattactttttgataaatgtcacagttccccatgaagaatagccctgagctttccttcattaaatatcattatattgaaatgtataatttaaaaatactgaagtaagagataagaagggtgaaaacatattctttataaaaccttaacacattgcttttagtctttgataaatcataaaaaggagttaaataatatgattgataacgttaatttaatccacatacactgatctatgcaaacaaagagtttctatcttctgtctaaatctgcatgggagatttagaaaaacatttatcatatcaaagtctaataggaaattgtagacagttcctactgtggctggcagaattacatgtagccatatagtagaacaagaaatgaataaatacataagcgcactcttgggttaaggaatcttagaaagtagtgatgatgctaacactgcatagcaatgagaacgggatggagccgacatagtatgccaagtaatactagtctcattaattgcaacaggaaacagtgcatatgtattaacttaaaaaactagaacagacaagaaaatcaaccttaaagaaatccattaaaataaaacattgttgataagttgaaaaatactgcaatgtttagatctggggatgattttttgaaaagagcagtgaaataaacatttggttaagataaccaagaaagaaacaaaaactacagaaaattaggaatgaaaaagacactcagcatagatacagatgacattttaaaattattgcacttaaaattttatatgagagactatgttctatgcaaatctaaagtacaggtgaaagaaacttgaataaactcgtaaagacagatggaatgtgaagctactacttgcaaaagagccagaaaatttcactaatcaaagttttcagatctccaaagaacaaatgatttctgtgctatttcaactttaagagcctagcaaaaaacgagatgcttaccaaatcattttataaagctagcgtgctcccaataataatacctaacctaggttacccccagaagacaattctgtgataatctaactttcataaatgcagaaatcctaagtgaaatattagcaaattgaataccacataataaaacattccagttattccatattcagtgctagaacaattaggaatcttttagcataatttgctatattgatatatcaaaattttagaaaaactagtaatctccatagatgcttttcattaaaagggcatttaataaaatttttcatgcattcatatttaaaaacaaaaacaatggcaatgcaaaataagctctaagtagtatttacatatttcgatttattatgcaacatttctaacatatataaagatatgaagcataatgacaaaggtccatgtacctgttatccaatttaagaaataaaacattaaaaattcagtagaaatcccttgggttctattccatgatcatgttcccccagagagagccactattctaaatttgttttttatcattttatgcatttctttaaacaatatgtagtgttgttagcacatagtgtttcttaattttaaataaatggcattctattatttgtattagtgggagacttttccactcaacatcttaagactgtatgtacatatagtcatttacaaatgattgattattcttctagagaacctgaaaaattttaaatattggaataatgaaagtttagtaagctgacaatataaaaatgacaattttaggtttagaatatataacagaaaagtgtcctcatacagaagcaataaaaaatataaaatatctaggtaaaactttaaaacgtataaatgatctaagtgaggaatgctaaaaaagttttgcatgaataattaactcatgagcaaaaagggtattttggggattgaatgtgctttggaaagcctctctcactttaatagacattcgtattatcaccctttattatacaacaatgttttcagtgggggaatgaatagttactacactctcctttgctagtggtatttatttagccctttcaaccaaatatcccccagccctctgctcatcttagttactgctcaccacatccttgcacgttccaaggcagcccttacttggtaaggaaagagaggcacagacctgtaagtggattgcccagaacaacaaagaggcctagctgaacataaccctttcttcccagttcctgttgcaaaccgtattaactgctgttgtcatagaattagaatgctttttaaagtccagcaggaaccttagaaattcaataatgccattttatagctgagaaagctaaatcccaagaaagctgagtgttttgcctgaggttatacgatttattaacggcagaggtgggactagaaaccatgagtcttcatgaggccttcaaagaactactttctttgggaccgacatgaagggtttaaacatttgtggctacaggtccagagagacatccctagaaaatgctgagattagtaagattttggttggagagtgtagaaataggacagcgtttgctttcaccctaaccagaatgaagggtctcagatttccaggttaaatgcctctgaaactttattctagaaccttcccactgccctagtttgtttaagtcaagcatgaactcaccactcaatgtttgccagagtttggatgaatgtcagcatcaggctactgtaataatggtttaagattatttaatcccattagttatacacttcattaggctgagtgaattgttggcagtggttcagtaaacttcctcctttagagataaaaggacagaaagaaaataggaaaggagcctattcctcattttctttcatagttataattcttttttttttttttttttttttttttccgagacggggtcttgctctgtcacccaggctggagtgcagtggtgcaatctcggctcaccgcaagctccacctgccgggttcacgccattctcctgcctcagcctcccgagtagttgggactacaagcacccgccaccacgcccagctatttttttttttttttttttttgtatttttagtagagatgggtttcaccgtgttagccaggatggtcttgatctcctgacctcatgatccgcctgccttggcctcccaaagtgctgggattacaggggtgagccactgcactggccataattcttaatggataaaggaatgataattacccagctgtagcgtggactccatattagtacggtctcctaaactactcttcattctcaggagaaataaatgtttgtaacctaatattctctattagaagaaaatggacagtggcagagaagagagtgtgtgtccgtgtgatcaggccataaagttaatcttaaaagtaaacctgaaaataaattcaaagattctagatatgagagtcttttacgtagtggggttggtatgaggcagtaaatgattttaaggaaagaatatagaatttaaagtgagacctggttcacactcagccagctgctattctgcattcttccctttacttttagcttcagtttcctcacacttagaatgaaaacaaacaataagagcaaaccagtttgttatatgttctcacatctgactttgtaaaacagtttgaaaacattagcgtgctcagctccaggattgtcccatgcaggcaatgactgttacatctttcccttctttgtagtttatttttgcccagatggatctgcattcatttgtactatctattataatattgttagaattcactattatactgtagaattcattaattctattatattgtagaattcactaattctataatattgtacaattcacattatatattataacattgtagaattcaccaataatattgtaaaagtcactaataattcataaaaggaatgaattcatttgtgatcttatcaaaaaaaatttaaaaagaaaaaagaggccgggcacagtagctcacgcctgtaatcccagcacgttgggaggccgaggtgcacagatcacttgaggtcaggagttcgagaccagactggctaacatagtgaaactccatctctactaaaaatacaaaaattagctgaatgtggtggcacaagcctgtaatcccagctactcgggaggctgaggcaggagaatcacttgaacccaggaggcagaggttgcagtgagctgggatttgtgccactgcactccagcctgggcgacagagtgagactccatctcaaaaaaaaaaaaaaaaagaaagaaagaaagaaagggagaaagaaagaaagaaagaggcacttgaatgaaagtactgtttcttagctcacatggttatagggtgaaatgaggattcggagaggacaggactgaacaaaaatcagtgtgggggctttgagtcgtaaataactgtaccagggcttagccccagttagacacataacaaatctgcaagagagaattttgcctaacttgaatcaccaaaggacaactgtaagtcagcatttcaggctctggaatattacttgcatacccacttggtttgagaacttgtggagtctgagagatggcaagtcatgagactaggagctcggttttctcaaaatgtgtcagcggtcacctgctttgtaatcactgtgaactcctcattaaaaagtaaagttctggactcctccccagaatttctgcacaaggagacaggaactttgcatcttttgcaaggctcctgggacagcagggagttgggaggtaaatttttatgcacagtcaagtttgaaatccactagtctgtacttccagtcaagctcatgcaaaaattggtcccaaaatatgtttgcattcttatctcccatcagctctcctacacattctttttacaacacttgcccaaggtgaggactcttctcctggacattgatatggaggtttctctgtctattcccatgccattggttgcctaccttctgccttttccgatctccagccttaaaatgctttcctggaacttaaccaactagatgtaaccatttctgaacatgcaaggttttcatttccacatctctcataggattgatcctcaccacaactggtattatcaagtcactggcatccttgacacactccagtactgacaggaaccccttgaagactgtgcggggtgcggggaggtcacccttttttcttttcttttcttttcttttttttgagacagagtctcactctgtagcccaggctggagtgcagtggcgccatcttggctcactgcaacctctgcctcctgggttcgcgccattctcctgcctcggcctcccgagtagctgggactacaggtgcccgccaccaagcccagctaatttttgtatttttagtagagacggggtttcaccgtgttagccaggatgatctcgatctcctgactgcagggaggtcacctttaattcgtctttgtcttttctgtagtgcttatcataataggtgaacctattgctgctctgatagtgagggggatttggggggagcctgtgtcactctagcactatgtctccccacagtcattgactcacataccctttgcttgccccttcgtgcacctaggacctgagactatgtatgtataagaaggaaggaggagaacttggctctgagagactatgaacagagtcattgctgaaatgtaaatatcaaagattgaagggaaagatgtgagagtgaagccagctgtctagcttccagccgtagaatgatcataagagctactacactcaaggtcaaacacactgactcacccatgaaaattgccaaggagtttgagtggaagttctctgatattccaatgactttgaatgggacacggtaattccttcccacagccagggcttacttaaaataagtaaatgaataaataaagtctactccctggatcttttttttgctcttgtccctgcagagtaaggggatgccagccaaggctgacatcatcattatagcaagacaggtgctttttttgaatacttcacaaggacaagggcctggtattatgtaggtcttcaaagaatatatatatatataaatttttttaattcagtctcctacatttatagtatggggaaataagacaagagcgaggaatgccttgcttgggatattgcaattggatggctgcactgaggactatttaagcaaccttaaaatcacaaacacacatctgtgatgactttttaattatatctgtcattttggaaaagatattaaacatcttcctcagaagttatttttactttacacactctttaataatgttaaaagatatttgatgcaatttatattaataaagctcatgggacgtgttagtaaaaataaaattgaatcttctaaaatatattcctttaaaaatgaatgtctataattttatgctagtttaagcaaataatctgaataaatcctgtttgtttagcataacacatgtacacgtagtttctccacaaaatggaacgcgctaaatgtgttggggcctcaggaaagaactagtggaagggggcataggaggatttgggggcaaaaggaggaatccaaaaagaaggtcttcatggaggaagagacctgtcccaatgtgtcattcggtagatctcactttctcctagtacctcatagtcattcatttttcacccccaacagacaagtggagactgatattattcccttttacaatgtaacaaaatcaaagcttagaaaaccagggggtttggaaaataaggaatttgtgtaggattaaaatagaactttgagctcctggactctgaatcttagcttctaccttgcacttaaataaatttatgctaacagatgtcctgtcatcagataggacttttttttttctttttaatgtcggcaagtctcattgttacagctctctggtctgcccagtttggttacacctgttttgagattccttgcctatacccttccaactgaagacaagcacttcctactgtacttacagaactttcatctatgtcttggtttaatcttttgcctttgttttaaccgtttaccacttctgctttatattggtaggtaatcttacccccaaatacatagactatgagctccttaggagcaaactcattttttttttcctgttgttctttgtgtctttttttccctatccacctccaaatcttactccacatttctgaaaatagcacccaaagcaatacctctcactttggggagtatttagtacattttttaaaaaatgaatgtattatacagtctggatcaccataacaaaaatacaaggactgagtgccttaaataacagagatttattttcttatagattgagaatggaagtccgagatcagggtgttagcactgtaggattctgctgaggactgtcttcctgacttgtagatagccaccctctcactgtgtccttacatggtgtgtgtggggagggagcaagcccactaagtgtcttttcttataaggtcactagtaccatcatgagggctccatccttatgacctcatctaggcttaatcacttctcaaaggccccatatacacatactatcactttggggttaaggcttcaacatataaatttataaagggactcaatttagtccatagcaataaattaggccttttgactatagatctgtaagtgcataattggcactgattgatggattgcagatcagaatatcctatgcttctagttatatagaaactacatgcttagtgttttttttttttttttagacagagtctcactctgttgcccaggctgaagtgtagtggcacaatcttggctcactgcagcctccacctcccagattcaagcgattctcctgcctcagccttctcagtagctgggactgcaggcatgtgccaccacgcccagctaatttttgtatttttagtacagacggggtttcaccatgttggcccggatggtctggatctcctgacctcgtgatccacctgcttcagcctcccaaggtgctgggattacaggtgtgagccaccacacccggcccatgcttagttatttaacagaggtttattgagcactgtgttggctttaaacaattttgctagacattcagtagggcctgatgagtgtttaagacctcgtacagttcaggtgcattttcctttaaggatacatttaacctgctagatgtcatctcattttgaagacaagagaaaaagagaggaagacttgttttttcagagggttattatacattcctattagatcattaggaaattggcacaagtggcaggaagccaaactgacctgagtctggctgggcagtgtctgcaggttactccagcaaagctgctggaataacgatgtgttcttccataaagtgctttttgtcaaagtctcttctggaattaactcctcatgcacagatcgataaaccccaccaacttgccaatgtaattaagaagtgacaggttaagcataaccattaattaagttcaaagtaaaagaaaatgaagaagattgtttttgtgaaattgtgctgtcagatttttctcaagggtatttctgagttcctataaaggggaatttaggaaagggaggagaagattgtctccacttccttgggaaaagtgagtgtttaaacacatgtccattgaatatttttaactgaaaagtgaactatttgccagttttaagagacattgagtgagcaccttctgtgtgcaaaagactgtgctccgtgctatgcggaatacagcgcagtgtgagacttgttcacgctctcgtggagccctgaggtgaatgagaagtatcagacatgtgaacaaatataacacaaggcaaagtaatccaacttatctgtgagagattcgggcagttgtgagagctcagaggaaaggccatgccccatcctacagtggggagaggaggggactggcatcgagaaagacctcccagaggatgcagcatttgagcaaagccttgaaagtagagtaggaatggataagggggaaagaatgaatgagaacagttccaatatctcaacatttttttatgttgaattccattatagcttctaggatcaaaggaaaagaaatcagcctcttgttcagtaaagatttgttgagcattcattatatgtgcattattctgcagaaaatttggggctgggagaggtaaaaaaataccttcaggataacaggctttttcacaaaagtatcaaatagtcttagactcattgtcttcctctgatggcatcttaatggaattcaatacaaaggccaaaattcctttgttttgaagccacaagaaaacacagccaatggaaaagccgtgttagtgctgcctgtcctattctgataaggtgaatacttaaaagctatgaaagaagcactgagtactgctggacagtttgagttcatttggctggtagaattgagtggaagtcaattctcatgccatttaaactggaagaaactgaagattctccaacccaagctcctctttttgcagatagtcaactgaagccctgtaagactgtagttttatagataaaaaagagccatgtgaatttcctaaatcacataacagtcagtttattatttgacatttatggtacattcacatggaagagaatgattagacatttccaggagagaataacgactcccaattccctgagttaccattagatggtattaagcaacttcacttaattatgtacctgttttccagttatgttaattatacatcctttagcatttaccacctgtaccaatcatttagcataataataccttatacttaaatgcaagtacccagaatacttttatagttgttttcatttgatattcacaacaatcctacaaggcaagtgttatttctagattagatatgagagaactgaggcatagagaaggtaacccatatagccaagaaactaaaacagggttctgacatccattttctaactatgcatctaggtttttttttttttttacctctgcgtctaagttgcctgcctaaatcgccttcagtccattgaaatccatccaatcaatatttactgaacatcatctgtatttcaaatattgtagtgggcattgggggtatgaaattgcaaaagagagaatcatcagtatttgggaaactcactgtttgaatgagatagaaagccaaacagataaatgggaattattttaagtgccataatgggtctatgcactgtctttggagattggatggacagggtagcaaaagattgaggagctaattttgctgctgtttatctaagcatgtcagggtcctgtcttttcacgtagattatgagtgtcttggcatgtcttttgtctctctgcatcccccgaggctccttgcacagtcctcacactccactggcgttctgttaatatttgttgatgatgatactggtgattttttctctctgacatccagaacactggagagattttctgttggcccttgggtataacagatttttatttatacatttgaattagccttttagaaatcattcttaagtaaaatagatatctttttagtgagagagtttctaaatacgaacttattcaaaacagtaatgatattctattttagccagctaatactcaactacgatttgcaatttagagagttgtgcttgtatagattgtccctttctgaagtgagtgaattgtaactttaaataagggctgttaacacatcaaaatagtttttaatcagcctcaaaaattccccttatttccaagtatcttatttttactatttcattgatgtttcaagtggaatcaaatattccaactgttttccactggaagaagatgaatttcaggtacaattcagtagcaaagaacacccatgttttcaaaataatggagaaatttttttctcatatgaagttatgattaaatttgtgaattgcacaagcttggaattctgctgcaggatgcctacattctgtattgctttattttggtcatatattacaaatggaatatttcccagctcatttatatacagttcctggttgctgaaattttactggcaagctttgtgaactaattttacttctcaaagatactaggaataaagtgaaaatagggtcttttctctcataggtctaaaagatacttctttcctttaaccattacattctggaggtgtaattaatccaaccctgctgtagataggatctcattataaagattctaggtaaacagtctttctagcagaaatgatctttttggttcagtcttgcagcatttcctaaaattgctagtgtacgtagtaaatagggaggtaagtggggaaatttcctaaaaatgccagtgtacagagtgaattgttaggtaaatgagaaaatcaggcttgatttaccaaccaccccatgtgcacatacaaacaaacacacactcacaccaaagccaggaaccctgcaacaaagttctatttaccctgaggagatataaaactttgtgactgccactaaattatttttttgaaaaataatacagaaatttgtaagcagacacaacagctctagtttatccaccaaataacaatataaatgggacaagcaaagagaaactgtaatttgaagatttttgagtgtgatacttataaaagtgtgtgtgtttgtgtgtagaaatgtattgaatttgagagtaatttatggaaagtgctgtcagcatggtatttcaaatgcttcacaatttgaatttaaactagtcaatgggatcattaagattattatgcatgttttccaaagagtttgaattcaaatgacaacttaaaagaaaaaaaaaaagatgtccttgaaaaactaaggaatgttagtgcacttatagaaattcttgcagtttggagtaatttgccacctccccttctgaaaaagtacctgatgatagtgtgcttgagagataggggtattgcagacatattccttaggtgagtaaaactgaattgtaaagtggatgctatggaccatggattatttcatttagtacgattgacagtagaaaatcaggaagggacgtgcatcagtgcgaggctgacacacagatctgaggatggcagaagctcactgaatagcacacgcaaggacccttcaaactcatcacatgtgccgtttggttccctttcaatgggtcggtcttggaatatggaggtctgctttcattttgtgccaagtaaccacgtgagcagtttacaaaagatacaaacagaaggctgctcattcatttttcaaaaagacttttttttttttgcaatggagtttgcaaagtgattttgcaatggattttgcaaaaaaaatggatgccattttttttaaataagtgtaattccaatgatgggaaatttactagctctcaaggcagcttttccttgtgttgaaatctctaaaggttaaaaagttactttttggaaagaagtctatttccttacaacatgttttcattggtccatagagaagacagctaatacatcttccacttggcagccttttaagtatttgaagaaaattctcaagtccatctgaatcttctgttttggctaacttctagttccttcatccatttccaacctaaatttgagcctaacgaacagatttcttctttcttatttaaatatatatatatatgaggaaataaaggcacagagggcttaagggagttgcccaagaacatagagctggttggatgactggaatgtaaggctgtgtggctctaaaccttgtcatttagactagaacacctatacgtcagttagcttcctgccacttcttgttttctgcctggataggactttataaagagtttggaagaagggagagttccgacgaggtacagaaatcagaacttccccttcttccaaactatatacaaataatcagttaatcagattaaaggactcttagtaacattgaaatcaaacctttgtgtttccaggagctctgagaacaacaatttttttggagcattgcaatctcttgagtatccaaaatgattctgtaatgatgtctgtgaggtcagaattggagcagcaaatggaattcctttaagggcttcccatcaatggacagctgattccagaaatggaggaggcacagtttgtatccaaattcataagcacaagtgggagaaattaggctttggtaaagagggtgacattcccaaaggaatcatctgtgaagttggggaaggaattcaagctcagggctgctgttctctaccaggttcttcagccagctggacatgctccccaggtttctactcagtctggaatgttagtaaaagtccacttcctctccttgtttctcccttctagtgaaaacgttcctcttctctaccttcctgacctcaagaccattgttccacacatcccccctcaggatcccaccccgccattctcattctcattacattgtttctggatccatgtctttatcagatgcagcccactgtccctttcagaagatgccagaaaatttacatatgtgatcaaatgttcccatcacaacagttctttccagtaatcccagtgctgggcagctgattccagtaatggaggagacactttcagctattaggcaatggatcacactttcaaaggagattgagcaatctcctcatcaagttgtacttagagcacaaatctggtgccaaaaggcactaccggattcagactgacagcactgagagttttgagtgaaagggaagttagactggtgttatgtgtattcactgggaggaactcaccgggagaaataaagagggtttccagtttattcattgtgtaaagcggctataatagtatttataggggttttgtgaatgtcaaataaaattatatttggaacagtggctagtgccataagtaggacttaacctttagcaatatgtactacattaaaaggaaggtggacacatgagtgatctctagcattttgtgactggaaggaaagagactggatgaccactcttcagagatgctatggacagtacttttgtcaaggactgggagtggagaaaatgacttatagtggtctttccaacatgaagtttgtattaatccgttttcacactgtgaggaagaaatacctgatactgggcaattataaagaaaagaggtttaattggctcacagttccacacggctggggaggcgtcaggaaacttacaatcatggtggaaggcacctcttcacagggtggcaggagagagaatgagagacaagcaaaaaaggaaaagccctttataaaactatcaccccctgcctcggtgcggtcgctcacacctgtaatcccagcactttgggaggccgaggtgggtggatcacgaggtcaggagatcgagatcatcctggctaacacggtgaaaccccatctctactaaaaaaaaaaaaatacaaaaaaattagccggacatggtggcgggtgcctgtagtcccagctactcaggaggctgaggcaggagaatcacttgaacccgggaggcggacgttgcagtgagctgagatcatgccactgcactccagcctgggcgacagagcaagactccgtctcaaaaaaaaaaaaaaaaaatctatcaccccccttgattcacttacctcccactgtgtcccttctacttcacgtggggattatgggaactacaattcaagatgagatttgggtggggacacagccaaaccatatcacacatgaaacacagaaaaaggacatctttttacatggatcttctgatatgcttgtaccaaagcccacagtatatcctgtcttcttgaaagagtatcatagttattcatttgccttggatggaaataatgttgtaataccagttaatacttttttcaactaaagggaatttggcttcatctccagttgcaaattcacatcaggaaatatcaaatccaaagatcaaaactcagtatctcatcactttcaggaccatccttgccacttgtctcaggcatcatgtacctggaagctgaaaagcaatgtacagaacctttgaattggagagatatcaatttgaacccagatcctgctacttcctacattgtgaaagggatcaagtttctttagttctctaaagcaaaggtttttcatctataaaaggaggttaataaaagggaatacttatcatgttgaattaatgggaatattaaatgagtttatgtggtttaattgcctagcacagtatctgcctcctaagatatgtttaataaatgctaactgtgactatagagatttaccctgaagatacctgtcatgtcatgccttctctgtcaaatagatcatgaatgcagttcctagcctctctctcctgttataccctcctagcaatattctgatgcagatgaacccagccacttgtcttttgcttgccagaacagctgaatgttgctgggaaaaaaaaaaacaaaacacagccgggcataatcatatcattataagttgtgaccagccttgacctgcgccttgaccccacccacagcctacattcttacaccctgctctcaactgtttcagacattctctactgtgacttctatctcccttccccactccttccttctcaagggatgccctggcctcattcttcatagtgaaaatgaaagctgccagaagaaactctttcagcttctgctctcaaatctgtgcccatcctttctgtcccttagtgcctatcagattatcagttgccaattggtctccatgtatctctggtccctttttcccctgtcttctgagtgccctggctccatggatcatccattctttatcctacccaatgggattcttctcgtcaacatccatttgtgccccagcttggcccatattttccctccattgactccacagctctctgtagctattgctttatcccttccttcacagccaaactctggaaagttggatattagaaatgctgtctccacactattcacaatagcaaagacatggaatcaacttaaatgcccatcagcgacagactggataaagaaaatgtggtacatataccccacagaatactaagcagccataaaaaagaatgagatcatgtattttgcaggaacatggatggagctagaggccattatccttagcaaagtaatgcaggaatagaaaaactaatgctgcttgttctcatttataagtgagagctgaatgatgagaacacgtggacacaaataaggaaacaacaagcactgggatctacttgagggtggagggggagaggagggagaggaatgaagatagctgttgggtactgggcttcatacctgagtggtgaaataatctgtacaacaaacccccatgacatgagtttgcctatgtgactaaaccttcacatatacccctgaacctaaaataaaagttttttttaaaaaaagaaaaaaaaatcctgcctccatttttctatcaagtattctgcctgctaccaggcccctatcccttcatagactagctgaggacatcagggacttccatgttgccaaaaccgtgagtctaatcagtgtttacctaacttgatatctcattcttacaaaactgtccctcccaacttccttggcaccccagcctcccgattttgtttttaatttttcaataggttattgggggcacaggtggtgtttggttacatgagtaagttcttagtggtgatttgtgagattttcgtgcacccatcacccaagcagtatatactgcaccatatttgtaatcttttatccctcgtcccccttccacgcttccccccaaatccccaaagtccgtcgtatcattcttatgcttttgcgtcctcgtggcttagctcccacatatcagtgagaaaatatgatatttggttttccattcctgagttacttcacttagaataataatttccaatttcatccaggtcactgtgaatgccattatttcattcatttttatggctgaatagtattccatcatatatatatattccatcatatatatatattccatcatatatatatattccatcatatatatatattccatcatatatatatattccatcatatatatatattccatcatatatatatattccatcatatatatatattccatcatatatatatattccatcatatatatatattccatcatatatatatattccatcatatatatattccatcatatatatatattccatcatatatatatattccatcatatatatatattccatcatatatatattccatcatatatatattccatcatatatatatattccatcatatatatatattccatcatatatatatattccatcatatatatatattccatcatatatatattccatcatatatatatattccatcatatatatatattccatcatatatatatatttccatcatatatatattccatcatatatatattccatcatatatatatattccatcatatatatatattccatcatatatatatattccatcatatatatatattccatcatatatatatattccatcatatatatatattccatcatatatatatattccatcatatatatatattccatcatatatatatattccatcatatatatatattccatcatatatatatattccatcatatatatatattccatcatatatatatattccatcatatatatatattccatcatatatatattccatcatcatatatatattccatcatatatatatattccatcatatatatatattccatcatatatatatattccatcatatatatatattccatcatatatatatattccatcatatatatatattccatcatatatatatattccatcatatatatatattccatcatatatatatattccatcatatatatattccatcatatatatatattccatcatatatatatattccatcatatatatatattccatcatatatatattccatcatatatatatattccatcatatatatatattccatcatatatatatattccatcatatatatatattccatcatatatatatattccatcatatatatatattccatcatatatatatattccatcatatatatattccatcatatatatatattccatcatatatatatattccatcatatatatatattcatcatatatatatattccatcatatatatatatatatatattccatcatatatatatatacacacacacacacacacacacacacatacccacacatcccagtttctttatccacttgttgattgatgggcatttgggttggttccatgattttgcaattgcgaattgtgctgctataaacatgcttgtgcaagtatctttttcgtatgacttcttttcctctgggtagatacccagtagtgggattgctggattaaatggtggttctacttttagttcattaaggaatctccacattgtttccataggaccagcctgctgattttctctttacctatgtctcagttacctttgctgttttgtattctccctgactcctaagttgtccagtctctctgggatcattttctttctcaattttctctttagtcaccctcatatcctcccaagcttttagatatcatcagtatgctgacatgtctcaaataggtaccatgatggttttgttactattttttatcttagccattctgataggtgtgtagtaattatctcattatagtttgacttgcttttctcaaagtgctaatgatattaaacatcagtgcaggctgggcccggtggctcatgcttgtaatcctagcactttgggaggctgaggcgggtggatcacttgaggtcaggagttcgaaaccagtgtggccaacatgctgaaaccctgtctctactaaaaatacaaaaaaaattacccgggcatggtggcgggtgcctataatcccaactacttgggaggctgaggcaggagcattgtttgaacctgggaggcagaggttgcagtgagccaagagcatgccactgcactccagcctgggcaacagcgtgagactccgtctcaaaaaaaaaaaaaaaaaaaaaaaaaaaaaccaaccatcagtgcagaagaggatgtggagtggagagactgcatcaattatattttgctgatgagaatataagatggaacaaccattctagagaaagttttgggaatttcttcttttaaaactaatcctgcaactaccatgtgacccagcagttgcactcctgggcatttatcccagggaaatgaagacttgtatatcccagggaaatgaacaaatcaaatatttgttcatagcagctatatttgtaagattcccaacctggaaaaaacccagatgtctttcaacaggtgaatggttaaacggtggcacattcttaccctggaatacgatttagcaataaaaggaaggagttgttgatatatgcaacaccttgggtgaatctcaaaagaattatactgagtgggaagggccaacccccaaaggctgcatactgtatgattctatatataacattcttgaaataacactatataaatggagaacagattagtgtttgtcaggagttagggatgggagacaagaagtcagggattaggaattgggggtttggggtagctgtggttataaaaggacaatagaagggatcattgtggtgatggaactgctctgtatctttgccatggtggcagatacattaatctatacaggcagtgcaattacataaatcaaatacacacacacctgcatgaacttacacatatatacagacaagtggagaaatctgaataagattgatagactgtatcaatctcatattctggctgtaatattgtaccatagttttacaaggtattattgttgggggaaactggataaagggtacttagatctctacgttatttctttcaacttcatatgaatctacaattataagaaaatttaaagtttaatttatagaaaaggcaattttagatttgaaataaaattcctacattaactgaaaaattaattaaatataaatttaaaatcaaaattaaaaaccctttgacaactttagatctctctctcttacacacacacgcacacacacacatacatctaagctttattgtctttgctctactaacagttcagctccctgtaattcagtttctatccccacctctccacttacaccacacttctgaacatcaccagtgacctctttgatgtttaatacacttaagactcttcagtccttatcattcttgagctcttgcagcatttaaagatgttgactctatctttgtttcatttgacttctatagcaccgtacactctgggttttcttcctatcgctgtacacaactttctaccgtttttaatagatttcctctcttcattccttaaattctccatttttcttgagttctgccctaatctcccttcttgtctcaatctgtactcctgagttatttcatctgcttccgtgagtacaaatatcatctgtgtgctgagaactctctggccaaaatctgcagctggatctctctgtaagctccagatatgtatctatcattttagcctgcagtcttcatagattggcccataggcccacaaatgcaacagtttcagacagaacccaaggtgttcccttttaaacctgctcctctctgtgttccttttccatgaatggcattaccttgttgctccaaccaaaggcacaggagctggcctgtatccttcctcttccttcagtatcccctcttatccacttattaaccaatttctgacataatactttggcttcctttatatcttctttcatttatgagacaagttccttcagtgttttctagtgacttttcattacttggaagagacagttcatactcctcacactaccatgtaaagagctcatagccacatgcacacacatgcacatccacttgtgcacacatacctaaacacacacccaaaacagagagattgtctcatgcctgtggctgggtaaacacttgtccttgatggaatgtgtagctttcccatctccatcccaatcacctagccaaaaactctcctccttcaggcctccatttagacatcacttttccctcaagtatgtgtgattcttgtgccttatcctccccatcatcctgtaatagcatcctctgcttttcctcatcatagcatttagaagactgtatttaaattacctatttgacacatacctcagtagctatacattttccctaaggggagggttgatgtcttgtttctcattgcatcctgcagtaagcaccgagtaagtgtttcttgactctggggctgtactgagttgaagaaggatgacatcactgactacagaaccctttgtataagcatcaaaggggtagcagtggggtaaatgatcacatcctggctaaatggttccgattcctacaaccctgcagcacgcccccccggctctaaaccttttagtcatttcctgtgaatcttgccagcactcatttcattttttgttttttccattttcttcatctttcccacatagtatagaccagaatgaatcaaggtctaacttatgctgactgtccgtgttgcatcatcagtctttggggccccttctcagtttctgtggctgctcttgtgcctgctgactccatccctgtagaccttgctgttcctcccagtctgtggccactaacctcagttatttttactgaatgtgttacctcatccatagtgagtcttttgttgttgttgggttttttttttagcaacaatgtattttttaattaaggtatgtacattgttattttagacataatgctattgcacacttaatagactaccatatagtgtaaacataacctttactgcactgggaaaccaaaaaaataagtgtgacacactttattcaatagtcactttattgcaatgttctggaaccctttttgttgttgttgttgttgaacggttattataacatgtctgatttagaggaaagtacactgaactgaaaatcaggaaagctgggcccagggggctggccttgagcagctgactaagcctgtacatttaattcaaaaagagctactcaggttattcccttaatcggtcttatactttatgacagtaagcacttacctcgttctgtcacatggtgtggccagattatgcatgtactatgattcaaaacattcacgtaaataaatcttcctaacatacaagaattatgtgtctgtggtgctttccagcttttgatgtgcttgcaaacccattttctcatttaatcctcacaaagttggaaaccagctcacttacttattcatgtttacaggaataatcaacattgatgccaataattttgattatatattttaaaaatctcatgaaattggttttaaaagaatcatttattagacaaaaagagtgaacctatcaacaggcaattcacagaagagaaaataaaaataacaaatgaaccaatgaaatgatgttcaaattatttaaagaaatacagtttaaaatattattttttcattctcagaccagccggcatttataagttcaatgcttggtattggcaaaagtatgggaagcatgtactcacatgggcttgtgataggagtacaaattaatacaaccttttcgaaacaaaatttagcactatctttcaaaattttaggtgtgcactatttttgaccctgcaactcgatttcagacagtaggcgtatttgcataaaggcacagtggtattctgtttcagaatacacattgcaacatttttatgatagaataaaaggactagtaaaataaagtacagcaactgcatgcaataataacatggaggctatcagaaaaataagacaaatctatatatgctaattaaagacaccttaaaaactattttaggaaaaaacaaggtacaaaataggacataaaggatctgatttgtgtttgaagaaaaatttcaaacatgagtgtttatatgtgaatgtgtgtgtggtgtgtgcgtgtgtgtgtgtgtacatgcttatacaggcatgtataagcaatctgatacatgcctgtataagtattacccaatcttttagtgattatctctggaaaagagttttacttttcattctctacccttctatgacagttgaatttttgaatttttaaatgaataaatgtgtgtgtgttgtgtatttttaaagttaacatacagactgagcgcagtggctcacgcctgtaatcctagaactttgggaggcgaatcacctgaggtcaggagttcaagactagcctggccaacatggtgaaacccttgtctctactaaaaatacaaaaattagtcgggtgtggtggcgggcacctgtaatcccagctactcgggaggctgaggcaggagagtcgcttgaaccaggaggtggaggttgcagtgagccaagatcatgccactgcactccagcctgggcgacagagtgagactctgtctccaaaaaaaaaaaatgttagcatatagcgtagaattcagcttttcttattctaggtagcgatggtgcttttcactgctttgcccaacttaattgacccaagtagaaaagtcttcaaaaaaaaaaaaacgctttagaaaaacactttagacactttagatttatgtgacttcaaaagtcaaaaatggtaataatcctgcttaggcagaagccttgccctcagtcccaaaacatgatggacaagcgggtgacttacctgtggcttttcttgtatcttgcagtctgtcagcaatcatgaaatgtaggcctcagagtggaagggcccctagagaccatccattgcctctcaggagcatggtcattctgcagatcaaggtcctgctctgggagaaatgggtgcacactcactctgcgttctgtccagcccttctgccacctacatttctatgcttttctcttactgctaaatagcttcctaaaggaaaagtgaatggtctttgtgaattcaaacctcattctgttgcttccctatttaaaactcttcaatgagtccctcttcccaatgctctgtctctagttgttctgtatataaaagctaaacttcttcacatgtttctgtttctcttgtttatgcgatcgtttgtcattggccttgtgttggtgatgtatgttctgaatgaataggctccagcaattaagtgactgagatgaaatgcttttgtatctctctagcctcatttcttttttttttttaccactgtgatgcaaacacatggaactactgttctccattgcaccatgattagtctatccgtagtcttttgtgtgtgatctttctgtacctagaacactcgtcttgggcttttgcctggccagtacattgccatccttcaggtctcagctgatttttcacttcttccatggagccccctctgacttcacaagattgcgttgtcctgctcatatgtcctgctcagagcatgctgcatgtctcacttcatagcacctgttatttttttagtatagattttggttttgtttgcctgcaccccattccttgaggacagggaaagtttctgtccccctgttgtgttgaggacactattaagttccctgccattacctggtgcttaacacatagtagatgctctattagtgttggaatggatgagctctagtgagtaagcgcctaagacaacacagaccctaaggtcttctgaacccaaccaagtgccctgtttttgctgctataccaggctgtccttcttcccactgccatcctcctggttctgttctctcagcccaagcaccgtgtgtagcctaatcatgtatatctattctcagagtttgtaggacaggatacgagttaacaacttaacgcccttcaagattttgtgtaacagggaaaggagagaacacctggaatggttcccgcttggagaaacgtttttcatccttcttagtttcagctccaatcagatggattcagcctgtgacagtcaacatttacagcccttgggagcagctccatactcacctcctttgcctgcttaccgcaagctcactgcctcctcctcagattgtgccagacataccaggtttgctgccggtgagaagcaacaatccaaatcctacctttctgttcaggtcccagtaaaatcttcactggcagcattttagaattgccccttccctcttctctcaaagggctgctgttcagctggcaggaccagcttctctgatgcagtgcagttcagtgcaaaccaacggaaagcccacagtttttttgtttttttggttttttttctaggtgtaaacaaacctggttgattgtgaggcaaagaaaaataacaaaaacaagtgagaatacattagattaatttactctttcttttttcccgctcattcataatgtgattgaaatcagaagtaaagaaagtaaaatcagagtgagttccctctgctcagtcacccaccctgatcacaagacttttggaatactgggaggcactgcatttaagtaagtatcagctgtatggagagtatgaggttaagatgatgctggatttaatttaaagtctcctcactggtttgcgtgaaggaagatttttatcaagcagagtgaaagagacagaatcttgaagcttccgcagaggggaagaagacagggccgtgcactgcgagtcagtatgcctccagtccctctggtgggcaccggtccacatcacaggaagcccagctgtggtggctgtcagtgtcagaggggctggcagacagtagtagaggcccagagaagttactttgtacgtatcagtctagaaggaagagattatgaagattagtcaagcctccctttctcatttatccttttttttttttttttgagatgaagtcttgctttgtctcccagcctggagtgcagtggcacgatctctgttcccgcaacctatgcctcctgagctcaagcgattctcctgcctcagcctcattagtagctgggattataagcacccaccaccacgcccagctaatttttgtatttttagcagagatggcgttttgtcatgttggagagactggtcttgaactcctgacctcaggtgatcctcccacctcagcctcccaaactgctgggattacaagcatgagccaccatgcccggccactttctcattatactgatagcaaaattgagacccacatcagcgatctaacctgtcatttcaatgatgtcctgacataagagtaagcggccagcctgccctttaagtaaagcctactcatatgggagtatatgtgctttattaattagcagaagggtatccaggccttcttggaagctgtcttctctctgtatgggtaaatgggcaacttttctagccttccgtctaattgggtttaatatcagtgaaagaatctttaagaaggtgtgcccttaggtgctagggccagtattgtaggtggcaaccaggtacattagtctctgcccttgtggaactcatattcccatgtttgtaaaggagtctgggcctcttatatgtggtaaatgaagtgactgtctatgtagttgcctttgcaggacacaagtccttgccttagtttccctccagccaggactgccccaccgagactattcatagctccaacttaaggtgctttaataaagggcagaaatcatgacaagaaaggacgcttttcttcaggcaatgaattcagcctgattttagaagctgttttggagaggtctctgtaagcatattacattttattccctgcagtacaatatttatacatggataatttgtattgacagttgatagttacatagaggtatatctcactggttctcaactctagctgcattttagaatcaccaggagaattttctttttcgattctgatgcctaaatctctgccctagaacaataaaatcagaatctctaaaagtgaggcccagacatgggcagttttgttattatttatcattgtttaataataaatattacgtaaaagtcagacttttaatggctcatttgtagggaggagaacttgccatttcccaaagtatcaccagcataaaaggtgaatttgtattttgttctctaagtttctggcatattctgaaactgcaatttaagtgactctcctacctctgtcttactcccaatttatatttagctggattcatattagagggcaagaaggggcaaatagaaaaaaagtgatctttatcaaacccatttccttgtgttagaaaaacgatttgttggaaaaagccatcgaggagatttgagattcagcacaaaaaagaattcgatatcacctaatacaagctgagaagggctacctcagggggtccttgtgcacctcactaaggaaggtctttggcagaggcagagaccatgacaaaggttttttttttctttattggacaagagccagaaaaaaatggccccaagattatgctcagccccgggaacctacagaaaccatggagcagtaggaatgggtagctagccgtgttagaagtaaatttgaggccgggtgcggaggctcatgcctgtaatcccagcactttgggatgccaaggcaggaggatcacgaggtcaggagatcaagaccaacctggccaacacggtgaaaccccgtctctactaaaatacaaaaattagctggacgttgtggtgtgtgcctgtagtcccagctactcaggaggctgaggcaggagaattgcttgaacccgggaggtggaggttgcagtgagctgagatcatgccactgtactgcagcctggcgacagagcaaaactccgtctcaaaaacaaaacaaaaacaaaaacaaaagaagtaaatttgattaatgaaatctacctttatgtttttacccaaagtgttatcaggaaagataacgttaaaaaatacacgtgattttcttaatgtcttagtttgagcaagtaattctaactactctagcaaacacatttttaaatctcagggatttaacacaatgcaagtttatttttgtctgacaaaaatcccccatgtttagccagtgcattccacgtgggattcagagactctgtcttattccatccagtggttccaccagtctctaaagcctagaggtcctatgccagattatgtgaattaaaattagaagagagtattaaggatcttctgggacagtggtgggatggttacagtttccagactcataaatgtaaaacagtgttccttctacaaatattctattggctggggctcattcactttcacacagtaacaaagaatgcttggaaatgtggccacactgtatacccccaaaagaagaggaattagtttggttcaaatttatctagtctctgtcatgctttcatcatcatcatcatcatcgtcatcatcatcgtcatcagctactgtggatcagcatactttcctgcaattttccaaatcgaattttgtggttatatattaacagagtatataaaattcattttccctacataatatgtattttattcctatatgtgttttctgcagtggtctgatttatatcaatgactaacatatagattcgatttgcaccaactagataatttaatctcttactcctccttgttgacagttggtggggtgcgccttatttttgaagaagaaaatgcttatccagttattcagccaatctcagttgacagcctatcacatgtcaggcactggaaattccgtggtgagcaaaaacagacaagtggcctgctttcaggaagtttctattctgttaagggagatggacagagtgttttaaaagaaaggagtattgtcctaagataattaaaacacaggaacctgacttagacagagattaagacaggcattcctaaggaagtgatacttcactgagttatgaggagtgagtaggagtttagacatctccagacagtgcagcacgctgatttgaggaactgaaagaaggccagtgtggtcagagctcagagactgagggagaagcatgatgcaggatgagttttgagagataaaccatgaaggacttaggccttgctaagcattttggcctttttcccaaaagtacaggaaagcctagccattttattattttataccacccatccattacaggcttttcctgaaaggtctttggcaataggggagctatggaagcaacatcatgagtaagtgactgggggaaccttttccctaagtgttgtggttgctagccacacaccatgtattcaacatctctccaactctcctcatcgtttcccagagctgaaagtaagatgagcacgaagaaaccatgtttagttaagaacatgacccgaagagtgaaaggtatttcctgttccaaataggagcccagtctgcattttctactacatgatttagtagaaagacacattggatttgaaccatatttcttctgctagccaattccatcttatctacaactttttgataattattttgagaaatagatctagatcacagccttccaattcctaggccaggatactttccatttttctacacagaccccattgcagtcctcccttcttcacaatcttcaaaatatccttctgattgaaccagatatcttattcttcatcccgtttcctgccccctaaaatgacctatctttcccttctaaaacttccactaactttaaaattggagctcaaggcttccatctccacagactctgccctgacaacaaattggttggttttattttcttcccaatgaatagaatagccgttagagggaattgtcttcagctcttttcccctcctcctcctcctcctcctcctcttcctcttcctccttcttgcaaatacaaacacagcagggctctatgcagctggttactctaggctctggtaacctaacatagcaggggaggacagaagtcaatagcgtgagaagtctgtttttgtcacggatttgctagaagctattaaagtgttcttcctaagtctgttacttcataggttgagggaagtaatgcatcccacacaagaggactgggatatgtttaaagtagtaggaaggcatttgccactattctagtccatcctgcccatgctgcctaatgtttgttcctacagatcaaaatctcataatcttctagacttctagatacagaagagttggagagatcaaagccttgcctctgacccagattattcgatctcatctggcatatcctacactctagccatcctgacctgccgtgtgttcccctaaagctcccatccttttctgactttgcttttcctcattctgtcccctgcattgaaatgcctttcccacatctctatgtctaaatcttacatggccaattccaacgtaatctaatctctgaagattccctttgctccccagttagaagtagtcactccctgctctgctcactttttgacatatattaatttatatagctatgcatttatatgtgtatgtattatattccttacaagagaagcttttgagagaagggcctataacttttctttctatttgtgtttcccaaagctccttctggtgggaaaaatgctttgaggttgaattaagctcacattgaactctatgatgaaaccatttgcttatgaacttggacaagtttctttacaactctgaaccttctgaattttccaccaggagaatgggaatgaataagtaagaaaacttataagacagctcctggtgtagggcctgactcatgtcaggttcccaggaaggccactttatatccttcatacatttgtatgtctgtgttgacattgaatgtttgcatgacatataaaatataagtagtaatgacaaatttaatagtgaatacttacagtagtgcatttcatcctatgaaacgggcaatctggcccattctatataataggggagaaaatagaaacttagatttactaattagttcaagttggcacagatataaggggatctcagacttcaactcaggcagtcaggcagggcctatactcttgatattcctttcttgatactttctcagtatcaaattaccacataatagacaatgccactcataaatctagcccactctaggaacataataaggcctgttgagacattcagagatgtctccctgatcttcaaagatgaatttttattcttccctaagctgctgtctcttcagtctcaacatcctaagttcattttatctttcctcacaggtcaggttttcagctctaactgtgttcatcctggtggctctgccctggacatactgcagttcttttatgtacctcttatcgtatggggtacaatggctttcggtactgctcagtgaggggagagaaatagatagtgtagtttctgatgtcaaggaacactttagagagaccttaattaatgtagccatatgttgacttcctggagcactcataacaacatgggaagcccacgctgggaagatgctgagtaggaataagagaacaatgctaagagaagggaaatttcaccgtctgtgaagcgtctgtttagattttatgtttaaactttatgaactctgtcacttgctggtgaattttcttgctcagtatcttaaaatacagctgcagtgtgggttccaccctcttcacttaaaagggtgattaactgtttgtgatgaataattatttaattgccagttcagctacatgtgtgtagttgttttgcttctttcctcttcagtgtgagccaaatcttctcaataataaaaataatccagaattagtcaactgccttttatcatgttctcattcagcctgctggagcaagaacattccaattctacatcacctttagcttaaaaagtaaataaatagaagctctcactcagccagttgatagttttactctcacagcctctcctgtaactaataaagtcttgacttcatcttgaaccttttactctatctttggataaaaatttaatcagaaagaattattgctcttttaatacctgtttaacctttacattcgcgatgggtacaaaaccacttaagatttaaagctctcttgttatggacttgtatgctgacctacttttcctcagagatattttttgcaagaattgttgaagcttgacatggggatcactgcaaatgtctcagctttgccattcactgctttccattcctatgtcctccttgccctgttaattattttaacagagacttgctattttaaggaagctctttatcgttactaaatctttttttattgttaaactcctttttctttccagcatagaagtatgtcatgttttctgtcttcagaatgtgcaagtgcttaccttctcataaagtgtgcctgttaccttaattttatagtctttatcacaaaaaggtacgtaagtggggttcagaatagtgtcttgcacttaaggtttaacttaggttttagtttcttcatgcaagcaacttgcatatgtagagaggcagcatgctatatagtgcaatgttcttcttggtttttaattataaaagtgatttcttttctagtaaaaaatcaagttatgcacaaatatatagagtgaaagtgttttcaactcctctctctagaggaagccactagcagttggcatatttccttccagaatttgttgtgtattataaacctatatacgtgcgtatgtatacacacacagtagtacacacattgttctgcaccttgcttctttgttttccctaagaatgtatgcttgatatatttctaaaaataataatgtatatgggtctaagtatttttagtgatatagaattctataggatacatgaaccgtaactcccttagtcatttctctactgattagtatttaacattgtttcttttttttttttttttgccattaaaagcaaatatctttgtgcaattatcttcatgaaatgttgaagctttctttttttttttttttttgagatggagtctcgctctgtcgctcaggctggggtgcagtggcgcgatctcagctcactgcaagctccacctcccaggttcacgccattctcctgcctcagcctcccgagtagctgggactacaggtgtctgccaccacgcccggctaattttttgtatttttagtagaggtggggtttcatcgtgttagccaggatggtctccatctcctgacctcgtgatccgcccaccttggcctcccaaagtgctgggattacaggcgtgagccaccacacccggccaaaactttctgcaggatatatttttaaaatgggttttccaagtcaaaagtgtatgtatgtttccattttgatacctactgaaatagctctccaaaagtgaaaccaaatttattcttttcaatggtatgtaagaatgcctgattccccatactctcattaaccttgagcatgttccatcttttaaatttttgccaagaagattgtctaaaaatggaatctcattgtttgtatttgcatttttatgatttttggtggatttagcatcattttctatgcttagtaactgcttgcctattcatatcctttatccaggttttttgttttgttttgtttctttttggtttggttattcatgttttccttattagtgtattggtagttatatgagttttaaccctttgtcagtggctaatttggaactcctccacagatccctgggggtttcttagagcagctgactggctggcagagctctccatggccttacctccccttcctcttctccgaactcacacacacactgatcgaacagaatagaccaattattacctgcatttcatgttgggctttgtgcttgagattaaacaaaggttcccggggctaaacgtctaaaaaacattgccatggaatgaagagccctagattttgtcataaagtcatctgtcctaggctctacaatgtagcattttcaaattggaagagccttcagagattattttattaccaacacccatgtaatataaattatacagttaatatatgttgatatacatgcaatactgaagaaatctctaatgcattctatattctgtaacagtaatatgtattttattatttataatagcttcaacatatattgaaaactagaggcacatacgtctataaacagtgctcagggcgtattattttggtgtttatttatttattaggtatttattattttatttagtccatagatgatgcatttatctgagaactcctctgactcaaggcccagcaagaatctgctgcccacagttatgagtagctgaactgggccaagcttttaattctataaatagcgaatctatgtagacactcagctagttagtaccagagtggtacccagatccgtgatgtcttgactcttagtacagtgcacttttccccactttgccattctttgctggtgaccttgggtagatcttcttaactgctcagagcttcagttcttctctcttttaatgagagtaataatgcatgcattgatatcctgactaggatggagttggataaagactgttcttaccttttgtgaatagcatagtatcttacagaattgtgaggaattatccaagtagctattgcccctcatcatggtgttaaaagtaggattgctagtttgaacggtaactgcaggaattcaatgtgttttgattttagcatattcccgtatcatgtagaccagtgttaatatttttagtattttatcttagttcttttttttctgaaagtcttgatttttcccagttttattttttagatttgaaagaaaaagaaaaaggatgtaactatgactcttatgttttcaatctctctgaaatataacaaagtaataactctaaatggtcaacgtagtagtctgagggcattctcttgaatgcttagttctgtgttacttaggatccattcatagagcatattatttatattatgtgaggtttaactcttcattataactcatggaatcaatgatagaaatgcaggttatttatactgtcagtcccaagtatgtaatattaaaccaccaaaattcagtttaagaaacttgcaataagctaccacttggctcaaagcaaggaattaggatggtcaggttgaactttctttatatataaagaactgagtctctgaaaaaggaaaaagacttttaaatgacatccagtgaatgtctttttaaaaaataatagctttaatggctgggcacggtggctcacgcctgtaatcccaggacttcgtgaggccgaggtgggtggatcacctgaggtcaggtgttctagaccagcctggccaacatggtgaaaccccgtcactactaaaaatacaaaaattagctgggtgtggtggcaggtgcctgtaatctcatctactcaggggggctgaggcaggagaatcacttgaacccgggaggtggaagttgcagtgagctgagattgcaccaccgcactccaacctggggaacaagagcgagactttgtctcaaaagaaaaaaaaaagctttaaaatatatattgcatatggataaatttacatatcataaaagtatacttggctaagttctcaaaagtaaacacacttttataatccccaccctaaaaaagaaggaacattagcagttaattacttcagaagttttcttcatgacaacctggttgtatgcctttcttttttcctaaaagtgatcactatcctgacttataataatactatatattagattaaaatacttttgttgtatatgctttttttttttttttttgagacagggtctcactctattattcaggctagagtgtagtggcacaatctcagctcattccaacctccgcctccagggttcaagcaaatcttgtgcttcaaccacacaagtagctgggattacaggcttgcaccaccacagagagcaatttttaaaattttgactagagatggagttttgccctgttggccaggctggtcttgaactcctggcctcatgtgatccacctgccttggctaggattacaggcattagccactatgctcaacttgttgtatatgcttttatgcagttttcttttgttctgttatgttcatgaggttcttctaacattttaaatatggccatagtttatcttcttctagaagctttaataattttaggtgttacttttaggtgttttattgttttgagttaatttttatataaggtgatcaaattttgagtaaaggtatttttccccccatagggatgtccaattgttccagcaccatttgttgtaatttaattaatcttatgcagattgtaaatcagatgcatgttacagaccatataaaccatagatgggtctatttctggattctctattctgttccatcagtctgttaatatatgtctgtccattctccagttcacacactgtgtgggcaattatcattttgcagcaaatctagaaatcaggtagtacggtttgttctgctctttcaaaattgtttggctgttctagttagttcacctttgcatataaattttaaaattcgtttgtcagtttttacaaaaatccttctggggttttgattagaattgttgaatgtaggtgtaaatctagggagaaattacatcttaacaataattatgtcttccagttcatgaatatacatgtctgtatttatttagattgttaatttctttaattattgttttatatttttcagcgtaggaatattgtacatatttcctaaggtttataatgaagtattccatgttttggggtgcttttacaaatggtgatttaaaaatatgcaatttcaagtattcattgctactgtatagataagattgatctttgtatattgcccatgtgtgctgtaactttgctaaaattatttattctagtagctttttttttattcggggggaggtttaatgaaaaaaattatgttttcaatgtagtgcatctttatatatatatatatatatatatatatatatatatatataaaatggaatacaattcagccataaaaaagaatggaatcatgtcttttgcagcaacatggatagaactaggggtcgttatcctaaatgaaataaattagaaatagaaagccaaatactgcatgtggtcacttataaattggagctaaacaatggaaacatatggacatacagaatgaaataaaggtgggaggatgatgagggttgaaaaaatacctattggatacagtccagtactcactcttcggtttatgggtgcactaaaagcccaaatttcaccactacacaatatatgcatgtgagaaatctgcacttgtacccccaaatatataaacattttaaaagatttaaattacattttctgtgagtagaaacagtttcatttcattatttgaagtcatgccttttctgtttcttgcccaattgccctggctagggactttcagttagttgttgaatggaagtggtgaacatgaacatttttgcgctgttcccaatattaagagaaaacattgagtcttttgccattaagtgtaatgttagaagtaaggttattgaacatgctctttattaagctgagcaagtttccttcttttcattagttttctgggaggtttaatcatgaaagtgtgttgaattttgtcaattgcctttagacataagttggtatgataataagacttttgttctacagctggttcatatggtaggtaacactggttaatttttaaatgttgtatcagccttgcattcccaagataaaccccacttggttgtgttgtactactccttttgtgtgttattggatttaatttgccagtagtttgttgaggatttttgcatttgtgtcatgaggtatactaaactgtggttttcttttttggtaatatatttgactagatttgttatcagtgcagtgctggcctcataaaaggaattgatgagttccttcctctcttatattctggaagaatttgtatggaattggtattattatttaaatgtttggtacagtttgccagtgaagccatctggacctggaattttctttgttagaaggctttaatctacaaattttattcttgttaattgacagtttgcatctcttagaaaattggtccatttaatctcattttaatgtctgtaagtactgtggtattgtttccctctcattcatgatatttataattaatgtcttatttcttttttttcttcttggtaagtctgaatagagtttgttgtgatttttttttcacaaaagaattagcttttggtttcactgagattttctctattggttttctgctctcaattatattgacttctgctctttattattttactacttttgcttggcttgggttaagtttgctcttctctttctatttccctaaagttaaagattcagttgttgagttgagatcttttgtttttttctaatatgaacatccaatttcaaagtactgcttaagttgcattctacaaattttgatatattgtgttttcattttcattcaagatattttctaatgtatctagtaatttttttgacgcatggtttatttagaaatgtgttatttaatttttaaatatttggatattttttctaggcctttctgttattgtcttttagtttatttccttgtgatctgtgaacatgttttgtgtaacttaaattcatctaaatttgttgaggtttgttttatgtgctagaaatatggtatatcttggttaatgctctgcacatttcaaaaatatgtgtattctgctattattaggtgaagtgttctatagttgtcaattaggttaatttggctaacagtattgtacaagttctctctattcttactgattttctgtcttctttttcagtaaattattagagggatactgaaactttgagcataattgtaggtttgtctatttctcctttcacttgtatggtttttgttttaatgtattttgaagccatactgttaagtgcacatacattaggattgttatatcatcttaaccccatattcaattccttccttattacataatatgattctttaactctgaaaatattcttgttctgaattttagataatattaatttaactttcttttattagtttacaaagtatttttccagccttttgtttttagtctatcaatgtctatataattgaagtagcttgcttttagacagatacgtctttcattttatccaatttgaccatctgtattttaatttgtgtgtttacactatttacatttgatgtgattattgatatagttggattgaaattcacaatcagcttttgttacttttccatctgctatatttttctcttcctgcctttctttgaattaaatgtttttcacaattccatctcatttacactatttgtttattatttatactcttgattttaatgttagtattaccctttgatttgcaatatacacctttaattaactagagtttaccttcaaatactattatatcactgtctgagtagtttcaggaccttacaattgttactctcaatttacttaccatcttttcgtgttcttgttgtcattcattttacttatatatattctataaatacacagcacattgatactaattttgctttagaatgttatcttttagagcaattaaaaataatgagaaagctaattcatttctgctttttcagcactttatttttttgtataaatccacctttgtgtctgataccgtattccttctgcttgaagagctcccttcaatatttcttcaattctgtcctgaaacagtttttaattctccttcatttgaaaactatttttaccaagtagagaattggttggcctttttccttttatcacttttaagatgtcacttcattgttttctcacttgcatagtttctgacaagaagtctgctgtcaatgtctttcttgctttcaatgcagtatgaatttttgttttctgactgatctcaaacttttatcctttgtctcttttctaacagcttgaagctatgtttattagggtttttagttttagttttctggttttagttttagtgtttgtatatatcctgtttgtcagtcccttaatttcttggctcttctatcttcagttggttgtttattctttagaagatagccaatatctcttcaatttttattttgttttggtggtttgttgccttcattcttttatattttctctttggagttctaactacatacaggcttaatatttttctataattctttgatgctctgttctcttacttttcactctttctataaatttctattgacctatctttaagtttactaattctttccccagttgagtctgcttatgagcctattcaaagtattcttcttctctgttactatgattttcatttctagcattttcattttattttcataagacagaatgagaaatattctcatatgacagtctctatatctttgagatcatgcaaattttcttcctttttcactagagccttaaacattaatcatagttattttaaattccctatctgatcaatccaacatctgtcttatttctgagtctatttctgtttgttgctttgtctcttgacagtgtgttgttatttttacttcttggtatgccaggtaagtttttgttaaaagccagacatattatataggataataaagataggctaatatatttcacacctgtaaatgaacatgccttttcttttgttaggcctttagtgtggggtgtttgtgtcaatcttgtcagaagttggccttgatttgaattttttgttgttgttgttgctgtgattccccttagtgcaccacagatttcaaatatctctaatgttactttgtctttgtggtgaggagtggttttccaaaaggactttctcagtatttgctccaccctcagatttagatcttctttttgtgcctgtaccacagagacaacttctttttttgtctgtctcccaaattttgcactgttggtgggaatgtaaattagttttgtggttgaacttgattgctgttactttttacttgatgcttttgaggcagagggacattttctgctgttaccttcagttttagagaggcagtgtggctgtgagtctccgaagcaggctgtttcagtgatcctgcctctccccgggactaaaatcacttcttattcttttcccctacctatgatgagttatcactggtgccctaagagccacaagactcactgttattttcctggggctgaagacctttattccaaagggacaatccgggagaagtatatgggcagggcattaagcctttcccagagctgctgctgttccgctcctgaagcctgcaccacaacagatactttatcagtactcttttttgctttttattttattctattttactttaagttccaggatacatgtgcagaacatgcaggtttgttacacaggtatatgtgtgccctggcggtttgctgcacctatcaacccgttgtctagttttaagccccacatacattagctatttgtcctgatggtctccctccctttgcccccatcccccaacaggctcagatgtatgttgtgcttctccctgtgtccatgtgatctcattgttaaaactcccacttataagtgagaacatgcagtgtttggttttctgttcctgtgttagtttgctgaggatgatggcttccagcttcatccatgtcactgcaaaggacatgacctcattcctttttatggctgcatagtattccatggtgtacatgtaccacattttctttatccagtctattattgatggacatttgggttggttccatgtctttgctattgaaaaatagtgctgcagtaaacatacaggtacatgtgtctttatagtagaatgatttatattcctttggatatatatccagtaatgagattattggatcaaatggtatttctggttctagatccttgaggaatcaccacactgtcttccacaatggctgaactaatttacattcccaacaacagtgtaaaaatgttcctatttctccacagcctggccagcatatattgtttcttgactttttaataatcgccattctgactgtcatgagatggcatctcattgtgattttgatttgcatttatctaatgatcagtgtcattgagctttttttcatgtttgttgactacataaatgtcttcttttgagaagtgtctgttcatatcctttgcccactttttgataaagttgtttggttttttcttataaatttgttaagttcctctagattctggatgttagacgtttgtcagatggatagattgcaaaaattttctccctttctgtaggttgcctgttcactctgatgatagtttattttgctgtggagaagctctttagtttaattagatctcatttgtcaatgttagcttttgttgcagttgcttttggcattttcctcatgaaatctttgcccatgcctatgtcctgaatggtattgtgtaagttttcttctagggcttttatggttttgggttttatatttaagtatttaatccatcttgaattaatttttgtgtaagatgtgaggaaggggtccagtttcagttttctgcatatggctagccagttttcccagcaccatttattaaataaggaaccctttccccattgcttgtttttgtcaggtttgttgaagatcagatggttgtagatgtgtggtgtaaattctgaggtctctgctctgttccattggtctatcagtactcttattctgcctcaggtctttcgtgtgagcatctgctgagatctgaggaaaagagtataaattaaattccgcttctatctgcactgcccaaagattctgtgttttaatactaccctacaactagtctcttgcaactggttaataactgtagttttttttttctgttaccaatagtatggcattcagaggccttaaggcagtaaggcatctgccttagtgttctgcaagtgttcacatcctgtctctcctcagaggcatctatctttccttagatttcaggttacagtagtttccccaactcccacttatcagtagttttgccttctgcagtctcagttacccatggtcaaccacagtccaaaaataggtgactacattacaatagtcatgtagagactattgtctctctacaaagagagagaaagagagagagagagagagggagaccacatacatgtaacttttattacaggatattgctataattgttctacgttattattagttattgctattaatcttttttgtgtctaatttataaattatactttatcataagtatgtatgtataggaaaaaacagtatgtataggggttaggttgtatccacagtttcagtatctactggtggtcttggaaggtatcttccacggataaaaggacactacggtagttggttgttctgcagcctcagttctctatggattcaaaaccagttttagatttgcacactgtctggcttgttttaaattattgtatgggtgggagtggtgctcctttcattttctccatcttgtacagaagccataattattttcaattctatataatttttgattgaatgaaaaataccataatttttttgttctattagtagacatttgaattatttatggttaggttcatgacaacaaggaatgcttctatgagcacatgtcttttggtgtacatatataaaatatttctcaagggtatagatgtaggaatggaattcattaattgtaggagaatacatacgacacacacacatgtatgagttatagggtatatatatatgtgcatataatgatttcagtaaattattgatataaaaattttcaatgaagtataactcatagaaaagtgtacctatcttaagtggccataggatatcatttagactgtaacataagagaactatagatattcacatccccaagcattaactgagaacctgttatacagtgggcatttaggaaatgaaaagtgaaggaaaagttactgaccttaggggtcttgaaagcgagaaaatgattaagtgctgtatacacacacacacacacacacacacacacacacacgcacacacgctcaaagagtagggagagaaaaattatgattggggaaatcaataaaagcatattggagaagacatcatttgatattaacctttaagtatagcagtgtagatagtgcgtaagaattggattatagaacttagtcattatgttaggaaagaaacctatggccttgttttatagcaattactggggatatccaggtcttttgcactggaagaaataatcttagaaccatttattaaggacagacccttacagatcatggggtccaaaactgtcttggggtcgaaaactttctcatcttatagatgaggaaactgaggcttagggaagggaagggacttgcctggggtaaatttttgctagtaaatgtacttaatgagatctctcagttacactgaaacgtttgagtattggaacattgtgcttttgttgttttctttttctttaaatccttaaaaaagttgtggatacatagtagatgtatatatttatggggtacataagatgttttgatatagacatgcaatgcataataatcacatcacggagaatggggtatccatctcccttcaagcatttgtcctttgtgttgcagatcattagaatattgtcttcatcattcttttattccccaccaaagtttttgtaaggtagtaagaggatctttgtggaaagaattcttattcccttacgttcctcctggtctgttcctaggtcaaggttgagtacgtttatagatattctataaatatattttattttcaacattaagtgtagttcatatagttgatgatctaagcaataagaaataaagtaaaatctggataattttggttactctgcttttcctctgtgtgtttcaactacaaaattcctcactacaatgctccccaattccttttattggtgcttgcagtgccagtgggcaaactgaattcttcatgcaaccaaagaattccaaaaacgtatttcttgcagctagcataaatctccagttccacaatggtagcagtggtggattttacccaatgttttaatgatgaatgtaatcagaacataaaaagatctaaatgcatactttgaaggaatttgcaaaaatgactagaagaactgaaaaaagcacaattcagtttgtttctttagcatctgtgtttatctttccccttctcttgtgcatattgaggatgttttaaagattatatttttaaaaccaaataaatagtttccaaaatgttcactgatggggtaaattagcgttctctttgtagatgtaattattaaataaattcaaaggactaaccctagaatgacatttttccctcattcctgggtaatttttgagatttcccctcatgcccaggagctaattatactctctcactctccctctctctctctctctctctcgctgcagctttctgtatgtgtgtgtgtgtattatatctaagaaattttactccaaacatctaacattctgggtacgggtttgatttggggaaaaaattacacttttttttttatcctttagcttttctccttaaaaagtatcagtgagggcagggaaagggaaggagaatggacccaaactaataaaaggattgatcagtgattatgaacaaaatatagcttctgtatttccactcactcagtatgaagtttgctattattttccccaattcctggagccagttattgcagcaaatttagcatttggagcttatagactcatgctagacagacacatatagaatttacgaatcgaattagaaaaatggtctttgaataatataaattgtactccatgtatatttttatatatgaatgaacctactggactccagtgagattagcaaataccttagctatttcattgcaataaaaaccatttttcagtcactcatgtccctctgggttcttcagtgatattatttgatgtatgctttattctgtgccatttattgtactgagtattttgcatgaatgatcttatgtaatcatcagtaatctgttaaatcagtatcattattattcttgtttcattgatattgaaatataaaagtaggttatcataaattaaaaggctacgggtagtgataaaattttattccaggtagtatctccagaatatgaattcttaatcactactcgtgtttattcattccacatgtcactgaatgcctactatgtctagcaaagttctagattctcttgtagttgcattactcagttattggctagataaccctaaacactgcagaaagctgcactctgcccccttgggattgcctggctccataagattattaccgttgctgagtttggggacccacttgagcaaatctagcatacttaaaaggaagtttttattctggagaagttttgttaacaaaacatctattggctgggcagagtggctcataactgtaatctcagcacttcgggatgccaaagtgggcaaatcacctgaggtcagaagtttgagaccagcctggccaacatggtgaaaccctgtctctactaaaaacacaaaaaaattaggtaggtatggtggtgcacgcctgtaatcccagctattcaggaggctgaggcaggacaatcacttgaaccggggagacagaggttgcagtgagccgagattgtgccactgccctccagcctgggcaacaaagtgagactctatctcaaaacacaaacatacacacatacatacagacccacacacacatacagacacacacacacacgtctatttagcatctgtcccaggcagtgcttctcaatagcatgttaatagatgctaaaggacctttagttaggaggtcaactggtctacctctgtcacttagtagacaagaaggttgccctaaaatatacactaagacagtatgcattacaaaaaagccacaataaggacatagcttaggagaaatgttatgatctctcttcaccagtctccttatatgacactggttcaattcagaagtagaggtgaagatagttaatatcctaggaataaatgttaaatctcccttcccctttcctcacagtattatagtcaattctcataaggaaatggccctaagttacaacattaagcttttctattcacttctaataactgaaattccgcccaactgcctcctcacttgaattccatgtactttttttccaaataaattaaatgactttctctaagtcaaatgctattaaaattcttgttgttcctcaaactctgctttcttgtagtatcaggtttattgtgacttgaatgagacttatttgtaaatggatgtattttccattccatcttgctcttgcatacacacacatacactgaaattcagacttttctgctagctcttagaaaacaaaagcaatgtgtgattcatgtgtcacccactgtgggaagttggatgttgcattgcatttgtctctcagtcttaaaagtcaatatggcaaagtcattagcggcagagcccagaagatatccctgcccatgagctgtggagatctggacaagttactttacccaactccaagactcagtgaatgctcttatccgtaaaatggggacaatgataatatgtcttcctccctttgggtatttgatgattaaatgagaaaacacgtcacacagtcaattcagtgcttcgcgcacaataaaagcttaataaatactagttatgattatgtttagccaacatgtgttggcatctgacactaaataaatacttgtccaatggaaatgaccagaatttagtgcccctaacacttcactgtagtatttgccatatggataagcaatctttattatgctatttggatttagttccaaagctaaccccacctccttatattgaagccagctcctaggccacctggataacttttctggcatttcaatgaacacaccaatacaatacaagcataattagactttctggattttagatctattctcaagtatatattgtatagagaaccaagatgttcaaggactgtagagccagttataggtttggttttaaagcacttcatcttagactcatttcctttctggctgatgttagttaaaataatataagcctgggcttaagattgtatctctgagtgagacaaaataatagatgattctatctccctttagaaaaaaaagaaaaaaaaaaagcagcagcagcagtaattgactcttacgcttaggcaagaactccacaatggatttgttggggaaaaaaaaaatgttttcctgcttgtatgtgttggtttagattttctgttgtatgtgtgttgtgaaagaagactttggataattattgcgattttccaagcagctggtcttccaatggcattgttacagggtcagtctattttcctttaatctgaccataatgtcatagaacactggctgtttctttggcaactgttcagggaagactagctgttttctctacctcaagccaatggtggactgcaggcaggttctcctgcaagccacagggaagcagttttcattactggggtctttgtatcaacaaatcacttatttcactgtgattctgttgagacaggatccgaaagtaaatttcataagaaaaaaatgattatacatcaagctcaggtgactttaaaatttttcctttacattgagtaaagtttctggccacttttgaccttttttttcaaatgacattattgatatgaaatcagaaactataactgataaactacaaactgctgtatagacacttttctacacaatggtcattgcttttattctttatctaagcctgaattgtaaggcttccttctctttttttttttttttttttttgagatggagtctcgctctgtcgcccaggctggagtgcggtggcacgatcttggctcactccaagctccacctcccgggttcacaccattctcatgcctcagcctcccgagtagctgggactacaggcgcccaccaccatgcccggctaattttttatatttttagtagagacggagtttcaccatgttagccaggatggtcttgatctcctgacctggtgatccacctgccttggcctcccaaagtgctgggattacaggcgtgagccaccatgcccggcctgaatgattccttctcatcttctgggaggtttttctgacttgctttctcaattccactctcttaggcagagcttatacctcccttcatgtatgttacatgtacatgtattgagtcagtgcatcctcctaatgaaacttttcctgagatctctcttatttactttcttccttttctgaaattctctgctatttagattcagtgccaaagaaattgacatttttatttacttgctgaggaataaacagaactcgaaaggatttgggaacccaagaccaagttttatgaaataactaatcttgtcttcctaaatactataaaaatcttatataatccctaatacttagcatagtgctaagcaccgaataggaatacaagaaatattgcaatgatctgaattgcttacaaaatattgacaacaacttcttcattggtaaagaaaagctgcttttgacctttttttcttcctcaagagtaagtagtgagaagcataaagtacccaagagtttctttgcctttttgattgttgcatggaaacaagtatttgcaaataattaagatgggaaaatttggctccttgaaaaggcaggactgctttcagatatatttgaaatgaacttatacagaagccaacatggttatcagagcaattgggtctatttcctatcatctcttcatgatatcttgtaaaaatgccctgtgttgagagcactggtgatcatagcagtggggttggagtagaatctggtgcgtttcttcctctacagatctcctaatagcacttgccctgttttcacagagccttatcaaagtttgatgtagactccagtgtgtagtagtgggcagtgacctaccagatgacctctttgaacaagagctagtttgagccagtgtatagctctgaatcgatggaagatccattttcaaatttcaaaagggctgttaaaacacttagttctgtattatagagatacacaaatggatataacaaactggatgtctcttctgcagctgtttcaattcgtatgccatgttttctatccttcttgctcctggcaattttctttcctgaagcatatcacaccttcttacatttgacaagcattttcacagctactgccactccctgctgccaaacaaaacccagccctgtttgaattcttgagggctgagggatggagaggagacctgtttgactttgaaatggttttaacgtcactttgtatacagaacaaaaatggaaaaccagatcctgtgtttgtctaaaaactaaaatttcaaaacctaacctgaggtggagaaacagatactacagggcaaggaaatgtctgggctcaccgcaaaggaatgcagcaagggaaccacctgcagacacctgtttaagagtttacgtttttgttcttccacacgattattatcttagtatctcaactggctatacatgcttttaggaaagttgcagggatcatattctaaggcgtatcaaatatgttcagagtgcaagcatgagcagaatctctcctctctgctagtgaggtcctgtaggtctacaagttactaacttcaggcttacagaatgttagaagtaacgggtgcatatcctgtaatcaatcccggtattgagcaaacaggcacaaatgacacccagcaagaaaaatgacttgctcaagacaccacagcaagttcatggttttctgaactgaattccaagtttcataacttctaattaatcctcctttttttcccccagtacagctaatatgctttttgtgaataataacatataataggtgtaatctgtcagaactatttaatagttgatagtatgtatcctcagtttattgaggttcaagctcttctgagtattataatactttctattggtattttctctcttgagctattccctaccttgaatctttcagactagagatttcagaagattacgtagtgtctgtgacttcaactacacatggatagtccacaggactctggactttcacggttccatgtcagttggacaggtgttactctaaggccctgcaaaaatataaagtagtttgagaatcactctcctgttaatcttcagtaaaattctgagctatttatatgtgagattgagaggcagcttggtaggatggaaagagtttagactttgtagttctactgccccaggtttgtatcccagctttatttcctaacagtgtagccttgggcaaattgcttaacctctccgaggctcagtttcttcaaataaaaaaatggaataagccttcccttgcagagttgttaatattatatgaacgttatatatgtgaagtgcccaactccttgcaaatacctaatatacaccagcttccttcccaggcttttgctggtcagatctggtttccacttaactttggctgttggaagataagataatttattatgaagataattgtctggtaattgtcatgagaattcagttgatgataattgaatgatttgtttacctttctgtctaaagagttgcaactcatgggggtcgtgtgtgtgtgtgtgtgtgtgtgtgtgtgtgtgtgtgtgtgtgttacttacaatgtttttgccatctcttcctgtatgacagtatttgattagtcaggtcttaaaatgctaaacactttatccttttcttttaatttcaattttagattttgggggtacatatgcaggttcgttacaagattgtattgtgtgatgctgaagtttgggcttctatcgatcccatcatccacactgtgaacataatacctgacaggaagtgtctcagccctttctccccctccttccttccttccttttggattcccaagtgtctgttattcccatctttacatccatgtgtacccaagttttcgctataaagaaaaaaaaaaccctgaatacctattgcatgcctcactgtagaggctacaggattcacaaaacaaggccccataccctgggcattgataaaaggaaggaaaaatgtagctttcaaaaaaatgaaaattgactttgttgaagggtattgtaatagaatcataaaactgagtgaggaaggaatgtattctaactacacaattagggaatactttgtggaggaggtgggttctggattttgaagacggagtatgatctttgacagatggtgttcggtgggaatgaggaaaaagaaaggtgagcttcagccagggattggaggtggaaaaaatgaacacatgggtggcgatgattcaggcagaggggcaggaatgtgaaggaactaagacataaaagtagaaagacagtttaggcctggtttatgagggggtctttgaatggcaaactcacctttggtggtccacgggaaggtttgttagaactgcaggagtgtgcccaaacctatatgtcaagccactaactgccagccatcagtttgaaaaccgaagcaattaagatcgctgtccatcttacctgaaagggaagctttgcactctaacttgaagtagcctagaaatttcagaaggttacatagtgtctgtgacttcagctacacatggataatccacaagactctggacttattttcactgttgtgtaatagggttagttttgtttttagcagattctcccaaggaagtgtggtaatcacatttctcaaaccattacattaactgctgttagcaataaattattgcttatgtgctaaaagtcaaaaaaagcttttcccctttggaacttctttactatactccctgatatgttttgctgtcctagaaactggtgtttgtgtgtgtgtgtttgtgtgtgtatgtgtgtgtgtgtgtgttcaattgagtcaagaacagaggagaggagactcaggctgaaaatgtcaagttattttgagtcaaatatttgtacatttactttggaagttatcactaaaaaacaaaaagtgtgtgtctctttgtgtctgtatctgtgtgaatctgtgtgcactcattggtataaaaggaggaatactcttctcaaaagtacacaccaatgttcttgtccaaaagcctactttcatatatgtgaatgtgaattcctacattctgtgtgtttgcttctcctcactatagcccatttctaacatatcccaacttaatttcctaaatctgtcctatctacataccacaaagtgcttaactgagaaattaacttctgtgttacagataaatggaagttagattaaaaggataatacattttcatttttagtgttcttaaataatcctttttattgtaaataaatataacgttaactccgataagtccagactacttcactgagttcaccaccgaaatgttttcacaaaatcagcatcgttataccttggcttttataagaagttagtatacgaaacttgtataggaaaatgtctctgtattatctatgaaactgttaataaatatgttttccatcatgtccatgtcatcgtttacatatacgagatgatttcctcttagaattcattctaaacttctttaacagaaattatctttttttgattcatattctcccttttgtcctggttaccagacagcacaagtgaccatcatgtttagatttctgatacagttctctcttccattcctctctgtagcctctgatttttttttcagacttcagttggaaaaatcctaatgaatgtaacttttagttacaggttgaattcttttgaatgtgtatatttaaaataagtaatgcacatagttaaaaagaaacatgtttttaaaacagtggttctcaattatagctaaatatttagaattatctggatggttttaaaactctgatacccaggcagcatcctagatcactcaaatcagaatatctgggtttggtcacggacatcagtattttttttttaaagctgcccaatgtcattccaatgttaagattcattgttttagatattctttattatgatgttcatcatttttacagaaacacatttccaaaaggataaatttcaaaatcacctgtaaacccataatttattataagtcactcttaacacctaaaaatagctaacctgctaacctttttcttttgctttttccttcttcttttaaactaaaattacaataatatatgtgcatatatagtgaatgtattcatttatatattagacacaatttacatatttatgcttatatatatatggcatacatgtacacgttacaatatgtgtatttgttttattccaaatctgttttattctcagagacattttcccatatcttcccagatatattttctgagaacctggtttttaatgcttgtataacattaatacttgtagttagaccattttttttactcattcttctattcttacatattaatgttgcagacaacatccttaaacaacttttgtgtgactaatccaatttttttccttgggaataaattatgatctattgatttatttctatgtgggctgaattttgtccataagaatgaaaatggtagccccctaagatgctgtttgctccctgatatctcatttttctctagaatacgaaggaatggctgttttctgctcttcctaaagattcaggatgtaataatatactgtcacaggtttcagaagcatgggaccttggcaccgaaagggtctctactagctaagttgtcttggaaatgagtgggtccacttcctcttctgatacaggaagaacagggaggtcattaaatgatgacggggctctttgaagtgaaatgaagcaacattggagggtgtagcatgtaaaaactctcttctcggatacaaaaaaaattgagctacttgggctaggagaagtgagcctggatttggaggcttaaggtttcaggaaggtctgagacaaacttaagaagaaatgcatcaagagggttggaagggacagacgattgatgagagcactgaaattccagtgtgatttgggtcacccgtgtgacatggcatatatttatgggatacctggaaaataagggagaaacaagacatctatctctgtcacactttggggaagtatacgattaagttccacactctgtggtggaaagaatgtcctggaggcccccagtctttctcactgtgatgccatgctcatttgataacctcataaacacatttctgttcttattgccttacccattctgatgcactgatcattttttaggccatgtgaacagggcagagcttgtcattatgcctgggacatagtgggcattcagtaggtgtttgttgaatggaagaagcaggcacaatcacagctttcccttctggtgatctgctttatgatacaatttccaggaatgcattgtgtctaaaattggggaccatatgtacaggaaattctttcttatgtcagtgtgaaatccctccaaagtaaatccccctttatggttttttattggtgtttattcttttttaatacagaaaactgtaaactttttattagggcaggtttttttgtgcaaaagccttgtcatgggctagatgacatttcttttcctgtagagatacttggacattttataattcaattacttccttccaaaagccatatttagaattccagccaatctgtgagccagaaaggagtgagccagtataataatcaaggtaatgtggcaagaaggtgtgaaatttcttagcctttctagaagagatgggtgaaaataaatgttttcagggtcagtaaataactttcccctagtagccagacagaaagcatcttactttgctcaagctggacctttgtcatttgaaggatctcctcctaatgccatctaagcttgagaggttcatatggctgcagcatggtttatcttgctgtttaaacattgtgtccattcaagctccattgtagacctttcttttaaagagagttcaccctgggatattaaataaaatggaatttggatggaaagttggcatcccagttcggaaccaatttttattgggcacagacttggggggagcagaaaaaaacaaacacaaagtctatgttgtaaatgataataaaaaaagaataagtaaaacaaatgaaaatgtttcgttttactaaggcttttttgcattcccatgacttcaaaatacttttgcattttatggcaatctataactgctttagtatagacagacaaagaacaaataaagttacataaatgcagagaataacagaagaaatatgtagaatgacagtggtcagttggtaaagattctattggaggttttggaggtttttgcataatttgtattagtccaaaaatattatgaaattaataataaattttaaagtgtatacgtttcttaatgtcttcaacttgccaattctgttgttagtcataaacttttatattcctccctatgtttatctttcccatctctccggcttgcttttgttattactgttgctgattctcaaaaccattagatcttaagtatattccactaccaaagtcattaattttaaggagaaaatgggaagttagaagccatgattttacttataataatccatttgtctcatactttcatctcaaaaatatgtatttaagtagaaagagagccagaaaaataaccgagagagttatattgtaattctggctctactgtatactagtagtgtgattttaagttggtaatttatcctctgtagcctcagcattgtcttctgaaaagtacgttcactcattcgggtggcgtgagatttaaaagaaatgactcctggtagagtagaatgaagtagaatgtagaatgcggtagcaatagaatgaagacatgagtattgatgatgtagcactggactgtgctatatgatagttaccagccacatgtggcttctttaaatttgagctaattagaattaaattaagttaaaaatttagctccttagtcatacgagccacatttcaaatgctcaagaaccatttatggctagtggctacaatattggacagtgcagaagaactattccattattgcagataatcctgttgaatagcacagacctagaatgacagctccgtgtagggcactgggaattgctgtttggggatggtatcaccttgagttggtctgtgacctgctgggagtaatgcagttctcaaagaactctaactctcctttaaccgcgtgcaaaattgtgaacctgggatgcgtgagggagtggttattttgtgctgaatggtatgtcagctacatcaccacagatgtgagatcagcagacttgcttattctgagtgccgtcagaatcgttaagtaccatatgtccagtgtcatctttggcacatttatctggcttcatctgagttccgaagtgaaatctcacagccgccttcataaatttagccatcaaagaccaaggtgatgatgacataccaagctttagaatcctcaagtagggtgggatattggtgctgggaatgacgaatgaagggacatctgagaatcatgctgcttttatggattagcagaaattcatcttacgtgaccaagagcagctgcataatggctagaaaacatttgccctttctgcttatgttttggttatcccaacacattctatgtgcaatgtctgagtttgaaagttctttttaaactataaaatcatttcccaaagttaggactgattatgaatatcatcaatgattgtttttaaatgtcattatggtaaagtcatagaatagtgaccatctgtgctgcctttgtctttgtataggtgcagtagtcccagcctttctttctctctctctctctctctctctgtgtgtgtgtgtgtgtgtgtgtgtgtgtgtgtgtgtgtgtgtgtgtaggatcactggagtatggtggtgaagaaagctgtcacagcacagaagttcagaaggaggtactgtgaaggtcccaaagcattgagcttagctagttctgaaagcactaaggttaactagtcaactcgagagttgggtgtatatactgctaaggaagggttcaacccagggggctcttgctctcccaagacaggaaacatgtatctgaagtgtgaatctattgctattatcctcagtttggcaggcgacagggttctgagagtgagagagtaatggaatgtgtatgtctctgctcttgaagataccaggggcacctcgaaaactcccctccccagcccagggtcaccacagccttaaccgactgcctcctttgcaaacctttaccatgggtacctagaaaaagacatacacacacacatttcagcttatggtttttgttcgtttgtttttgttttttgtttgtttgtttgttttgccagatacttaagatttaagggcaatcttaagggaaatctcttctcccatcttgactgaggcacagagatgtcctgttcccatgctgttgatgctgacagacgtaggacacgtttttttctccgtgtgccaccacactcaagcagaatgtataagatattttctgtctaccaaggatacctggtgacataatcatacctagcctttctttcctccctccgccccctcagcctctcaccctgccctcccatgggtctttatgtgtgctactctatgtagagtacaactcataccggatagcctgttacttattttggttcaggagcagctgcagaggatgaactggagaggacagtctacttgcaaacacttgtagactctccagtggacaggttacctctaaagaaagagaagcctacgctttcctactcactgaagttttttaccatttgcaagtggatccaatatatgtttgttttgggtgaggggctaacaaaatgctctgcggtttctgcaggtttccttataggagatcctgttatcctcgtgtcgattcttgccccattagctttcagcagtaaatagttgagggtctcatctggaaagttctattattagtaccacatggtcagtacattttaagatagacattttaataggcagaaaactgtatacaaggagagatgtgcaatgcagaataactatcaaatgatatctagatatcttagattgctactctaggccatccatggtcttaccccatgggttcctctaactcccttcatcctcccttaacattagctgtaggttttctcatcactgtctttgctcacgttattttctctgccttgaattccctccctcaagctccccacaccagcaccaccagcatgtaccctgttctttaagactcaactcaaatacctctgcctcaaaaacatattgccctaattgtcctggctgaaagtgacagtcatctctggaccccccccactctcatctctgcacctctctatgtcatccttaatcactttctgacttgtgttcttacatagttgaatatgccttatctctactacttgatattaaacttcataatgatgataagatcctatcttatcttctcctgtctcttccctgatcaggcctagggtagttcctcccacactgtactgttaagagaatacataatgaaaaagtaaatgaataaatggcagaaaccttatgtggaatgctggtgcaaacagttcctttgactgggggcttttaaaaagagactgattgtataggagatctgagcaattttcatattaatggaatggattattagagctggcatgaacatcaaaagaatctagccacaaccacctctcaggtcatcttcattttcaaatggggaatctaagatttagataggaccattccagatcacatagtgagtgattaatagacctaggactcatacctcatctgacatccaacaccacatgttcttttgaaataaggctggaataatagtgagacacacatattagacacatgattgtgagaagacagttttccaccccacagcacatgaccccatacgtttaagtccctgcctatacaaatagtacagacaaagtaacagcaactttagagggaaacatgactatttccatcatatggtgattctacagagcagaatcagaaacctgggtaaagagaaaagtcctactcagtttcattcttgttaaaagacttaatgactggagttcaaactggcggagtcattggcagcattaaagaagtggggttgaagctgggcaacatttccacaacagggagtggaacagagagacagaaaatattgggagtcttgtgccccatcagtagaaggagatgaaggccagagccaaatggtgggggcaggggtagggggaagattcctttctccagcatgtaacagcattatgggagtgaattcagagcttctgtgtgttctgagccaagtgcctgctggaatgtggactgtaaatctctcatcgtcctcttcactgacccacaagcaacccctgctcctcccatctgcttcccgaccacctgcctttcagtttttctttatataaaaaacgttttccattctcctaccttcctctctgtctacctttgtatggtacatctcatccctcttctaaatatttccatctgaccacatttttccctaatgagacaggctcacaataggataaagtgtaacatttattcatttatctgctcagcaaatattattgagcacatactgtgtcctaggcaccactttagttcttgagtggtcagcagtaaagaaaacagacaaaaaaataataccctggtggagtttccattctagtggggacacaataaacaaaataattggcaaattatatagaatattggaaggaagtacatgctgggagagaaataagctgggagggaaaagggagtgctgggggagaaggagctaagagtctcagttccagagttaggcagcctgagctggaattagaaccccagctgcatgcagtggctcatgcctgtaatcccagcactttgggaggccgaggtgggcggatcacctgaggtcaggagtttgagactaccctggccaacatggtgaaacccagtctctactaaaaatacaaaaaaaaaaaaaaattagctgggcatggtggcgggcacctgtaatcctagctacttgggaggctgaggcaggagaattgcttgaactcgggaggtggaggtttcagagagcagagatcacgccattgcactctagcctggcaacaagagcgaaactctgtctcaaaaaaaaaaaaaaaaaaaaaaaaaactcagctgcatccttcccagtcatgtgacctgggcaggttaagagaactccctgagcctcagttttcttgtctgtttatcaagagtcattagggaaactagtatctccttgggttgttgcagggattcaatgagatgacacatgtaacacaatcattacctcgggcctgtctcctataaatatagtgattgtcacgtttgttatttaaacaatattatatattgtgttttaggtattatgtatgtaatatatagtgtgaatatatgtatgcgttatgtatatagcattatctgacttcgtgcctctagtattacatgcttctcaaaatatctatagttttgtcggtatttctttctcctactagattgtgatcttttatcggcaaagaccacctctcatttatctctataccccccattgtgcccagcacatcagagattttatgtttggctgctgaatgagaaacaaatgggatactgttcttctaagcacaatcatcttatattagcattcatttttggaactcttctctaattcctgtcatttttgtatcacatcagaagaagagctatattccctccaccgcctctcctcgcctattaatcaccataccttcccacctcttacgggaataccgaactaatggtccttgtctcaatgacctgcctatcctttgtcccttcatgggaatcttctcacagatcaagttactatgatctacaaggccagttcccatagcctcgttccacttacacacgatcttaaccatttctgtccagtgggagtcacccactcacctcctaaaacctctatgcatgccccatacccctagtcataatactcttatacaaatgtttaacactttgcagttgaagacccaatgtcatacatcttttcatttgatacttagagtcactgtgtgaggtacaaacttcagatattaccagttgcatgttactaataaggaatcagaagctcagagagggggaatgaaagaatccaagtatatgtggctaaaattggccacgtcgacacctgaaatcctattatctggggcaatatacatactgggtttgaaaaagttcacacttagcagttgaatgacctgagtcctcaccccagcttggctacttactcaccatgtgaccctgaatagtgccttgaagcctcagggtttttttacttctgtaaaacagtaactcttgccctcccggacacatgggatagtttgaagattaaaagatacattggctgggcatggtggctcacatctataatcctagcactttgagagactgaggcaggtggatcacttcagtccaggagtttcagaccagcgtggacaacacagtgaagccccatctcattaaaaaaaaaaaaaagatatattaagaaacttttgaaagtataaatcatctaaatcatcatgtataaatgtaagagatatgaaataagctctgtgaaaatataatggctgatggcgtccctgtgtgaaagatagaaatggacattttatgtaatttccatacacaccaaacaaaacaaaagatctttagaatttccaagcatgagtgaggttttacattgattgtaaagaatatagaatgcggaaactcatttttaattattaaaacttataggctgaaaaaaagagtaagcactatttaaaaaaaaaaaaaaaaggctcaaccaggcgcggtggctctgtaatcccagccctttgggaggctgaggcgggcagatcacgaggtcaggagatcaagaccatcctggctaacacggtgaaacctcgtctctactaaaaaagtacaaaaaattagccaggtgtggtggcacgtgactgtagtcccagttactcggaggctgaggcaggagaatcgcttgaacctgggaggcagaggttgcagtgagccaagattgcaccactgcactccagcctgggcaacagagtgaaactccgtctcaaaaaacaaaaaaaaaaatgcttccccacacccacccccaacgaacgaacaaacacacttaggaaatagggaagaaggttatgttttgggacaactttctatacactgagaaaatccaagaggtctccacatctacctataaaattcagtgatgctcagagctgacatgtcaatttttcctattacatagtaagaagctcagcattatgggccgagtttattggacactgcagaaattcatttacattgtgtgcttaccctggattgttgttgagtccagctgactgttgcttcacaaattaactgtcctttgagacttggaaatattgaaattgcatagagtttttgtgaaatctcaatcctgtagtattgtgtatattacaacaggtgctcaatagacttctggattattaaattgagtaatatttgtagcaaagatctgtaggctgaattataaagctaatctgtggggggatgccaagatttctctatcattctgctatgtttgccatggtctaccaggagatggcgcctggtaagagttccatattttaatgtattctggtccaaatcactggagttggcaaagatggagaaggaggaactgagcagttcatccccaaagacatgatgacaccactataagtgtgaagccagcaagagtgcaaagactgagagcagcgtggtcatacctagacatttatctggagagcaaaatcaagcactggggctcaaagggttcagtcccagcagttaggagagagaggagtctcctaggagtagttgccccaacagctgctagaaagtcctgatcctttttggtctgagccaaccaggtctcagcccagtcccacttgcctcaatttaaagtgacatttttggtctctagctgggtgcttccccctctgtagcatataacaaggatacactttcaaggcagggagcctggaggacaaggagataaccctgcaggcctggccacccaggctctttccggtgttccatgtacactgcatagattgagtggacacccaggttaaagagatctctcagtactcttggattttcctttaccttaattttgaaattataatattttagacataacttgtgcaggatcacacagtgagtctataggagaactggatgagaacccaagttttctgactttcaatcagctctctctccctacatgtaccttaacatgtatcataaagatgactgttgccatatgggctaagccctccattttctgagtatgctataccacctccttccctcagaacaattaacagaggatctcataaagatgtgctatatatgtgtcccatagattttaatgagacttcagtaggtgggaaggtgtagtatttattctgggatattggaagagcaagttggataggaccttaaattttctacatagatacttgtggaggacaggctctagggtgacttccaatgacccctgcctcctggtgtttacatctctgtgtaatacctctccttgagtgcaggtgaatctgtaacttgcttctaatcaatagaagaaggcaaaggtgttggggtgtaacttaccatgattacatgttgtgatatacgagtccatctcagcagatagagagactctccttgacagcttgaggaaataagtgaccatatgagagaagctcatgaggcaaggagctgtgagcaacctttaggagctaaggacagcttccagcagacagccaacaaaaagctaggatcctgactcacatacccacaaggaaatgaattccgccaataatctgaatgtgcctggaaaagattcttccacagccaaccctccagatgagaatgctactcagctgacactttgattgcagcctgtaagactccgagtggaggacccagccagagtcatgcctgggccctcagaaactgtgagatagtaaatgtttgttgttttatgccactgagattgttagccaacaatcaaaacctaatacaataataccctttactgttttctagacagctgctatttagaaaagcctcccacccaataaaagagtcccctttatagttttccaagtaggtggttatcagggttctgcttcaccatcttcagtggcaaggaacttccatttcacagggcaaccatgtgtgtattacagaggcttgcatgttgtcaagttcagctgtggtcttcagcgggagcctaggacatgccagggatttcaaggtaggctggtgaggggttcctggttttcttggtcctgaaccatcccagtgccattctaacagttgcaagtctgcctccttcatgacaaaaggactggaggaaaatgtatctggcaagtcgataacactggatcgtttgctcccagctttaccacttggcatcagtgcaaactttcacccagttaaataacttaatgagccctgctctgcatgcttgcttcacagagttgtgacgatcaagtaagacagcatctatgacagtgtttgttggctgtaagtcagcaaatgattgcaaatgatgattattattaaaataatagtcatttgtcagtaaatatttgtcaaagctggtccacactgagggagacaggctctccagggaaactgctgatgcagagataaagaggagaccagccccagtttggaattgcatcactgattctgaattccccatggtacatttcaggtcttgcttcaggaatttgttttttgttttgtttggtaggaacaagaatcccctagagccagttatgttgtcatcaaacttagttgctaattaggcaccaaagcaaacctatgccagtgagacagagttgaaacttgaattcctttctgcaggtggagcgttggatcctagaggcggtgtatacagcttggctattttgatgcttctgcatgcaagaaggtttaagagaatctgagtaaagcaattagcatccctctgtctgcaggcaaaactggtttggacatgcttctctcttcttgaagggctgttagagccttggcagtgtatctgacgaaagatttcactaagcaaaatgtcttcacttacaaatccagccactttgcactctcagtcagcctcaaattcatttattttctttagagtttccctacaaccacgaaccaccaagaattaaattaatccccaagagcctgagcaattatgaggatgttgaatctatccattcaaggatgtcccagcaaggactgttcattcttttaacgtaaactatttatatgttttgattctcctcatttggaagaaagaaataagttttcatatatgtatttttcagggtgtattttatatatctgtttatattacactgttcacattactattaaagcatccccattttattgtaagtttattttgcctgcttcgggaagaacaagaccaagatcccattattaaaaccaaaatcttccacaaaagtttccttttaaaaacttagattaggaaattttcagtcagccagccaactctatagcctttgatacttggtcctacaaagttttcttcccctttggtctgaatgttttcctttgtctgtgcacactctattctcctgccagcatgataatacatgctgctttgatatcaagtggcgggaacatatagaaatgtgctattggtgctgcaatttgtatctttgttttcatcaaacttattatttaccattttaggatttttttgtttctttttgggtgtttttttttttttttttttttttggtgtgttttgtttgatcttggttttggttttccaatctaggcctgaggtccagtgctaatttgatgctagtgtgaactctctgagcctggttccttgacgttccattgggtgactattgcagtggttcagatgtggtgctaccagccttccccaccaaggaagttgcctgctttctcatctttgatcctcttcaccaactaaccacaacacaccagtgaaaattttaatttctccattcagttcctcagtttccgccaccaggtggtgagttcctgcgatacagataacctttttgtcttgttcagtacaacctcagtgcctagcacaaggccttgcagaaagctgacattccttaactctttatttctgaaatgaattaatgttcttaggttccatgtctcgtggaccaaataatgcaatcctagatcttgccatagcatctgggacaccacgtatgatgatttaggtaatcagtgaaaatccatgtcagcagctgccaatttacagatgaattatgtccaatggtttggagatgaatgagttttacagttcatagagcatgacaaaattcatcttagccttccattttatagatgagctaactgatctctgagagaggaacgacctctgaatgtcctgggaagagcttgtggcagaagtaacttctacctagtagtgtattttccttactgcctgttctcatttgataacagacccatatatcaattatttgcatccttcaattaacccacaagaaggcaaatttaatccagtgttagataaaataattattcacagggtcataacactattaaagaataagctatggccaggcgcggtggctcactcctgtaatcctagcattttggaggccgaggggggcagatcacttgaggtcaggagttctagactaccctagccaatatggtgaaaactgtctctactaaaaatacaaaaaaaaaaaaaaaaatcagctgggcatggtggcagacgcctgtaatcccagctactcaggagctgtagtcctagcattttgggaggctgaggcgggcggatcacttgactaccctggccaacatggtgaaacctcatcctactaaaaatacaaaaaaaaaaaaaatcagctggtggtggtggcagatgcctgtaatcctagctactcgggaggcggaggcaggagaatcactcgaacccgggaggtggaggttacagtgagccaaaattgcaccattgcactccagcctaggtgacagagtgaggctccatctccaaaaaaaataaaaagaatacactatgaggcagtgagatatagggcaagactcatgttaggactgccacagagcagtcagtagtggcaacaagaaaggaacgcccctacgatgtgacaagtctctaccttgatatcaatggaattatgaatgggcagagaggctgtgcccattcttacctaacagggaagctgtccataaataaggtagcaattcctgaatcaaggacaagccttctgcccagtctttatatgtaaagaaacagtagtttcatttgaagggaaaccattataattgtctcagatgtgcatcttgttccagggtacttctttgtatttttgatgaggaaccaaaggctttattatagatcttgtgaatacctgtcagccaggatttagaacaaatgcatttgggcaattttgccttttatttcagataaattttatatgttgtttctgtccagaattgtaggatcatgtttggcttttcaaaactgcaggaaatgtttattttacttttctttaaagaagaagacagtaatgaaaaatgtatcgactgccagcccactgtttttatttctctttgtgtgagctatggcttctccacatcttgagccttaaactctttgatgttgtctttttaagcataacataaaagattattccctttagtctgtaggcttggaggtgggcaaacatgacatattcctgggtattcatatttctataacaataattgatgcaggttttggggctgttgtatttgccgtagccttatatgataaacatttggcattccatgacgtttcagctttgtcaactttccaatcctgtatggagttccctcttattgtttctgtgtgaacaacttgacaagagtggcatccgtggtcagattcttcactctatccctgcaggacttttcattgtgctctgcacacgatggaggctcaatgcatgaatgaatgcatggatgaatttttcagtttgattccgtgagctgcttaattctattagatgcgctccctaggcttttataagacgtttaattggtacatgtttcttatcactttttaatactccataagtgttttgtgttctttgcagtagagtccaaataaatataaattaaaatgtttccaattacagaggaaatattttcagtatcttcccacaaataacactgggtttataaggcttggttcccgggtttcatggtcatgcttggttgactaactttgtgttcatgtggcataagattctaaactgtcagaactacgtgggcttttagagcccatctaaatccttctcactcacagacgagcaagctgacatatttgcctcatttattggcagtgaatgaattaaaatattgtgccttcatcaagatattgtgtgtatattcacaatgttgtttttcataaatatgtagcattactctgttttgtgactgctcctagactggctggttctagggataaagaagagccagagaagaaatctgggcttcccagcagcaccttgggaggccgaggcaggcagatcacaaggtcaggagttcgagaccagcctggccaatatggtgaaacctgtctctactaaaaatacaaaaattagccaggtgtggtggctggcgcctgtggtcccagctactcgggaggctgaggcaggagaattgcttgaacctgggaggtggaagttgcagtgagctgagattgcgccactggactccatcctgggtgacagaatgagactccatctcaaacataataataataataataataataataataataataataatctgtgcttcctgcttaatttctagttttggtattcctactatcaggcccaacctctgtcctttgtgttcacagctaaatttgatttgcgtttggtcagaggatgggagaacagagaacaatagtcaccctcatcagcaactgagaaattcagtctgttctgccaaccttgcttgtatcttttcatataaatcttgaaattgcctctatttcaagtctgatggtcagtgactaattattaaagccattacttgctttttttaaagcctgaaccttgctttccagaatcttttccacctttgagattattttaaatatcatcattactttgagaaaagcaaacttaacaaggatgccttaagaaatataaaggtgtcattgcccaggaggcaagaaagggaggcagaatggtaatgaaatgagacagcccttgctttggttttataagatctgggtctgaatcctggcagtgtgttctttctaactttaggtaattcaggagccctagaaacctcatctctctatctagtgtgggaaaacgtgaaacaactttgggccatagattgctctatgcaaactcaacatatgcaaacttgtcttattaaaaagcctatctctagtggttcctatccctagtcttgtttggttgggtagcttccaattaataacagcttcaaattctggctaatatttgtttagcacttcatggcttacaaagtacttcattattttaacattgtagtattggtaataatatcaaactttctgttattacaataaatgttccttttttactttattattccattactttattactgtttttcagatgtactgtgatctacattttacggatgaaaaaaagattctaggaggataagggactttgtcacaaaagttagcttctaaatgatggggggactcatatgcaccttttgaaactcctaaacccatgttgattccccaaaggctttggtggtcctaaacatttgacataatcagagtctattataaaaaggtatggcttatccagctcctggttcctcactgtctcctctatctcaaaatattctagaaaaaactttactccctgaaaatatacagctttaggataggtgcagctccatttcatactctgattttcattcctcatttgaaaagttgaagcgtaatttcttataagactttagaagttgaagtcaggactggataaagaaaatgtggcacatacacgccatggaatactatgcagccataaaaagggatgagttcatgtccttttcagggacatggatgaagctagaagccatcatcctcagcaaactaacacaggaacagaaaaccaaacaccacatgttctcactcagaagtgagagttgaacaatgaaaacacatggacacagggaggggaacatcacatactgggtggggcctgtcgtgggggtcgggtgcaaggagaaggagaggattaggacaaatatctaatgcatgtggatcttaaaacctagatgacaggttgatgggtggagcaaaccaccatggcacatgtatacctatgtaacaaacctgtacattctgcacatgtatctcaaaagtaaaattttttaaaataagaagaagttgaagtcagggtataggaatcacaatttgcagtgctatctttcacacttcttaccacctgatgaaaatcaccaaatagtatttcttcttttacctaacatctctaggaaagagagaaccctgactgcacctacaagtagggaaaggcatttgagttacgcaaagctgcttttaactctgaaactgtcctacagtgtagcatataaacagggaaaacattttattggtgttttaatagaatcttatctaaatatctggaatcttactgcaagggccgatcattactctaggtagatttcaaggcccacagctccattatgatgtcaacaaggataactgatgtttattctgtagttagagcccccaaggcttcagcaaacattttgctcatcacttgtaggactagcagtaaatgtaatcattgcaagactgagctaacacatctgctaacagggttgttcatttgagtaaacagcaaggtgataaggcgcagggacggaccattggattgagtcagacaggcccgagtacaaaaaccagcctcactacttaaatcttacatagcccattaagagtaagttgcttcactttgggaggctgaggcggacagattacgaagtcaggagatcgagaccatcctggccaacatggttaaacctcatctctattaaaaaaaaaatacaaaaattaactgggcatggtggtgggcgcctgtaatctcagctactcaggaggctgagggaggagaatcccttgaaccagggagtcggaggttgcagtgagccgagatcactccactgcactccagcctggcgacagagtgagactccgtctcaaaaataaaataaaattaaattaaattaaatttaaaaaagagtaagttgctcaactttttaaactttagttttattatccacaaataataaattataaattgctgctttacatatatgatataaaaatgcatcaatccagttaatttggggtaaatggtattattccagtcttacctcctagaatactcagaagacacaacggtgtatcactagaaggagatagttttgttttggtttggtttggtttcttcagtcttctttttcctattccttccttttccaagaaacccacgatttctttctttctttttccagctattgatgaggtcagggagtaatatgttcagatctttgttgtatctttgttccgtttagaaaccagtatctgggaattcaacagagaatttggggtcactggaagctatgttttacctacatacaactacatcttcctcttagacctagagactagatactgaaaatgcaaaaggaagccatattgacactcccaaggataagggaaggcattacatcatcctttgtaatggtgaatcttgtgcatttgtagagggctggactttggcttctaccatattgtttagctctgtcaaccccacacaaggactttatttatttatttagacagagtcttgctctctttcccgggctggagtgcagtggtgcaatcatggatcactgcagccttaacatcctgggctcaagtgatccttccacctcagcctctcaagtaactagcaacacaggtatgtgccacctcatctgactaatttctttttaattttatatagatgggatctcattatgttgcccagcctggttttgaactcctggccacaagcattattattatcctcatcttacacatgaggaaactaccagtgaagtggcttgcccatcatgtgaaattacatatgccagtactagcctgttctgaaatccagcaacattcttttccacctctagccttgtttctagcaccctttggcctccagagcaagctggggttcattttacattaaaagtagagccatctgatgtggcgggcatccaaaacacttgggaaaatgctactctgtttagaactcgcttttcttcctcccgggtcccagtgcaggaggtactgtgtgctatgtgggccatcagactgtccctggccatggcaggagaattaggagaccaccagggctgtagttaactgtaggtccttcattaagaccagccaattgatagcgtgtgttcatgagtccttgtgaagtcttttcatcagccacgtggaagaccccttagaaaaacaatctctgtaatttgtatttttggacatagtgctttaggaaggtggatgtctgaaggtgggctgggtttgaaacatctctcaatgccatgggacagtgtggtacagtgtcctgacaacttaagctcatcctgacaacttaagacactaaattctactcctgcctcttctagtctagttggtcacctgccctttctgaatttgtttttttttttttttttgagatggagtcacgctctgtcaccaagctggagtgcagtggcacgatctcggctcactgcaacctctgcctcccaggttcaagcgattctcctgcctcagcttcccaagtagctgggattacaggtgtgcaacaccacgcccagctaatttttgtattttcagtagagatggggtttcaccatcttggccaggatggtctctatctcttgactttgtgatccgcccaccttgggccactgcgcccagccctgaatttgttttcttaactacccatttatttgcttgaaacagatgacttaaaatattccttcctcctctgaagttgttctttaaacttttctatgtaagaaattgattgagctgtattcctaggtattttattctctttgtagcaattgtgaatgagagtttactcatgacttggctctccttttgtctattattgatgtataggaatgcttgtgatttttgcatattgattttgtacgctgagactttgctgaagttacccaccagcttaaggagattttgggctgagacgatggggttttctaaatagacaatcgggtcatctgcaaacagagacaattagacttcctctctttctatttgaataccctttatttgtttctcttgcccgattgcactggccagaacttccaatactgtgttgaataggagtggtgagagagggctaatttacattcccaccaccagtgtacaagggttcccttttctccacatcctcatttgttttttccagaagacagcatttgctattacctgtcttttggataaaagccattttaactgaggcaaaatgatatctgattgtagttttaatttgcatatctctgatgagcaatgatgttaagcagcttttcatatgcctatttgccatttgtatgtcttttgagaaatatctatccatatttttcgcccaattttacatcagattcttagattattttcctatagagttgtttgaactccttatatattctggttattaatctcttgtcaaatggatagtttgtaaatatgtttccctttcactggtttttgtcttcattttgtttgtttcctttgctgtgcagattaacttgatgtgatcccaattatgcatgtttgctttggttgcctgtgtttgtggggtgttactcaagaaatctttgcccaatccaaagaacattcatctttgtcaaatgagctatagaattaatgtttttcctatttttatttattcattttatatttatttctattttatatattcatataacaatatatttattcataatatcactttgaatatcatttgttttcatcttgcatttttctcatttttcattgaggcctaatttacatgcaatgagatactcagatcatgagtcgtagttttaggagatttggcaattgtatatattacccaagaaagttcccttaagttcccttattcctctttctattcaagtcccatctgccaccctcagaggcaatgactttctgacctctatcaccagaaattatttctatatgttcttttaaatcagataagaatcacaccatatttattttttgtatctggattctttcattttgtgcagttgtctgagattcatccatgttgttgtattagcagtcttcatctttttgttgtttagtatgccacgattataccataattaatttacccatttttcttttttatcataatcttatataagggaaaaacatgggaatacatgaactgtatctttggctcaaatccatcttctatcagttctaagggcctcagggtatttgccatgaggggctgtgacaccagcctggactattaggaatggacctttgcttctcacagcagtcatttattcctccactttttctactagcgtcatgtgaagtgggaagggtactggcccgagagttaggagactcgagttcaagtggcagctctgcgctggcttggcagtgtaactggccactccatcaccaggacttaatttcttcatcagtaaaatgtttggtttggactgaacagtccctttttcatctctgacatcctacggtcccttaaaaatccctcctctgggctgggcgcggtggctcacgcctgtaatcccagcacttcgggaggccgaggcgggcggatcacgaggtcaggagatcgagaccatcccggctaaaacggtgaaaccccgtctctactaaaaatacaaaaaattagccgggcgcagtggggggcgcctgtagtcccagctactcgggaggctgaggcaggagaatggcgtgaacccgggaggcggagcttgcagggagccgagatcgcgccactgcactccagcctgggcgacagagcaagactccgtctcaaaaaaaaaaaatccttcctctgggtacctcatctttttcagttgcccctgcagtccctctctttagcatttctgtgaggaagtatccaaagcattggattacttgagataatatttctggtcctcttcctctctcacactctacactttgcttttctagaattgaagcctggagaagaaatattgtctaaagagcttgctacaagaaaatttccctaaaaagtattgggtcttaaaatttcatctcattttcaagttcttagaatactgttaatttgcaaagctgattatggatggcatactttattatgctttttaatcatacttcaaaactgcactatggatttgttctttctgtcttcctcccatgcttaatcattatttttggtggcaccttctaaactgttgacttattttctttctttctgatttgtagtagatgttgtataatctaagtttaggcagagatagtgaaagtgctggcctgcctgtatttcagccagtcctgggttaatattattcatgtggcaatgtctgttttactttaggactcaacgtatttaatacttcctctcctcctctttacaatacatagaggaaaggcctttgaaacataatttctctccctatgggaaatgctttctataaatttttcattttcaatacaaactgcttcactttacaaaacagtatctgtccctagcatgaaaaaatactggagggatatgaacagtaaaggagaatatttttctagcttgtgttaaatcaataatgtagtgattccaagggaattgagaggttcgtgtatttattcatatattagtcaaaaattcaaaattctatctctaattaaaaaggaatttgagaagtatctaccatttttattgtccatctctttggacatatgctttgcagcacagtggagcggaaggagcgtagacctacagaaatttagagggctaaatttttaatattggcctggctacattgcctggactttgggaaaatcacttaagctctcttagccttagtctttttatctgtaaactgagaataataatgccagtttttcaaggttgcattgaggatcttaggtaatacatataacattcatggaacataaaatgtgaaccaatgaaggtgccaatgcaattacaccttcattaggagttgtcatttctgcggcttctcattagaacatcaaaattagttccttcaatctttactgaggcgcagagctttaaactctaactttgaaacttccaaaatgaagtgtgaaaggtctgaggccttgtgagtttgaaaatgcagttcacacttcattttagaagctccagaattttttaccaaattgagattggattcaggaaatcatattttaaagccctggttcatgccattttctaaagaagtacctagaaggccataatcagaatgcttattaagtgaccacactttgaactgcattgcagataaattacctctgtgtggggagatgtgtcttgagattctgcggtcaaggctcagacagccccagagctggaaacctcagagcatttatgcctctgtcactaaaggatggggttatgggggctggacagaaagcttgagagagatgaaaagttcagtgggcttgagggaggattactgaattacaataatatccacaccgtaaagtgaatttgtacttgcaagagacacattatttatctagaattttagaaagggtctcttttcaggtcactgtgtagattgcctgtgatttgttctccttgattgaatgtgagtgagtgtgaagcatatctaaacaggtctcacagcaagtttctttcataaatctcctctggtatatatgctgtgtacccttgacaaggagaacactattaatggcgacagtatgcactggaactcagagcactgacgtgggaattgggagctctcaggtctgttgtttctgccagagaatgactctgtgaccttgggacaagtggattcacaaacaagctgaaggagatcatatctgtcctagaccgaaagcttatctgagaaagatgctacatgactacaaagaggttatttagtttcttagttcagataaggaaaacactaataattagtccaaacttcgaggctttgtctttgtcttctaagcttgctttcccctgtgatgtccagtctctcctaaaccagataaggattcacactattaatctcgacaaaatcaattctttgcatttgtgcttttattaggtcagtcattagtcaatgaacacttattgcacgcctgctgtttgtgcagacactgtgctagtcaggggatgcaaaagatgagtccgtgctggtcccatttcaaagaactcaaaatatggtggagacaagcacgtatacaaaaccagaacacagtataatgaataccacaggagtatacccgcaaaagttatatgggtgaagaaagaaggattaattagttctgccagagaaggactaattcagggaaggctttggagaacagggcacacatgatcggagactttactggttcagtcagctatataagtgataaggataacatgaagagaggtgccaagggcaagaaagtataagatatgtgtagaggctgggtgcagtggctcatgcctgtaatcccagcactttgggaggctgaggcgggcggatcacgtgaggtcaggggttcaagaccagcctggccaacataatgaaaccccgtctctactaaaaatacaaaaattaggcgggcatggtggcgggcacctttagtcccagctacttgggaggctgaggcaggagaattgcttgaacccaggaggtggaggttgcagtgagccaagattgcaccactgcactccagcctggttgacagagcaagattccatctcaaaaaaaaaaaaaaaaaaaagagagagaaaagaaaagttacatgtagagaactgtaagtaatcttatctggctagaatatagggtaccataggggaatgactgagcatgggtcagagttgtaaacatccttatcatgccaatgagttggatttctccagaaggcatagagagatctgtttatagtttctaggtaagaaagagtttatgaacttgcctgtgtcttcgaaatatgctgtggcagaatagaaaaggtgatcaaccagagtaggacagaggccacacacatctgccctgaggtcagatacctatacatttattgtgtttgatagccaaatgattttaatgtaaactagttgcaaacatttaaaatttgggaaattttacataaaaatctagattttcgagcttctattaagaagtagagtgcacaatatctgcctagcaagaaacagctgttgctgagaagtgtcttccaccttcagctagagcatgcagtctgacatttgcttttctggttcttgtatttgagtgtgagactcttggagtaaagcaaacccagggtcagaaagatcactggtgatgatgttgcagttgtactgtcaggactgatgaaaacctaaactaaggtggaagccttgaggaatgaagaggagggcaaggatggatttgctgattgtttagatgtgtcatggatgaaagagatggagaaatcaaagaagactctcaggttgtaattttaggtaactgggtaggattcccatgtagtcagaaacccagaaagaagagaaggctttgggaagatgacagtgtattcaatgtggctttttgtggttcaagactttggaaaatattgattagactgttgaaaagtacttataggtcaggaacctggtcagaaagtattgtgctaaaataatattgttatgacccaagcagttgtaaaaataacttttattgtctaactctcacagtttatcttgaactcttaacaggttgtcaggcaaatatctgttcttgaaaccagaaaaacaaatcaagaaattgggatatttgaaatgcctagagtgggcttataactgtaaatgatattttacaatggaaaagtagaaacagtctttagcagccaatgtgaaataactgggtaatgttatttaatagaatgcaaatttgaaatgagtgataaccattatggagaattttgttaggaaaaaaattaataaagtgaatgtaacacatgaagcagagctggaactaggaagaaggaagtcaggctcctggggaaccaaattaaggagacttcccctctcaggcacttgtgggaccctgacggtaagcatctccttaggtactgctcccatcctcatccttgccttgagtttttgaaaaatatatgttagaaatgtttatgattatatatcacaaactgttattctcaattttatgaaattccctagatatgattacaatagtcatttgagatttatgatcttatctaattgttatgtatgtacccattgtggggtgatacaggcagaataagctctgaatttgagacttgtgaaaaccataagagcctcgagtcttgtcttatgagtctccgggtagagctgaactggctgcagctccaatgagaggcaattgcttgagaactgtttccaccagcatactgcatggaatgggtccctctctgatgcagatcccactgatactgatgtcgcactcttgctgatgcagatcccactgatattcatgtcgcactcttgctgattttgatgggccagtcaatagcagggcagcgtgtcaagatgctggagcaaggaagtcctttgtactatttttctcactgctgtcttttccttatggcatgccattctgtcttagaaaatgtgagacctgaagtagacatttggcatcatctagtccaacctctttgatacacagatgtaaaaactgaggcacagaggaggggaagaactttgctcaaatcaaaaagtgtattaaggatggatgcagtggctcacgcctataatcccagcactttgggaggccgaggcggatggatcacaaggtcaagagatcaagaccatcctggccaacatggtgaaaccccatctctactaaaagtacaaaaattagccgggcatggtggtgcacacctgtagtcccagctactcgggaggctgaggcaggagaatcgcttgagcctaggaggcggaggttgcagtgagctgagatctcaccactgcactccagtctgatgacagaacgagactctgtctcaaaaaaaaaaaaaagaaaataggttccgggtgttgcagcaagtaataatgattaaacattgtttaattaaataattaaacaatgcttgcttctctcccactgaaggaggtagaaggcacagcaccgtggtgagcgaggcccagctttctgctgtgttcctctgccatgcctagcatgcgaccactgtggagtgatgccagacggctgtgccattccagtgcactgaggacggagggacccttttcctctgaggacacatcatttcaccttaacccctttggccagaacaaagttgcatagctgcaaggacgactgggaaatatatttattctgggcagccatgtacttagctacaatttggaggttctaaagaaagaaaggaagagaatggaaacaattttcaaggcctaccacagcaaattggtgccatttctaggactagtatcctatttcctaactcctagtagaatgttttttctataccacagatttttaattctcataaagatgtgatttttaattaagaagcctataagaacattttgaatatgcacaaattcatcattttatatgtccatacgggatgcagtgattcccctttgcttaagatcaatttttgtttttattaatcccttgatatatagataggagtcaggcagacccaagtttaatttctgtctaccaacttgtgactttgggtccatatgaataaaaaaatctatgctttgattttgttttttcctctctaaaatagtaacaacatgtcatcttggggttgttttaaaaattaaatgggatgatattaatgaaagagcctagcccagtgtttagtattgaataggtagatatctaatggtacagataccagtttccttctttctcctcacttccttaggttccctccaacctgaagacaacgtatgtttctcatagataattacaaggaatttaaatccttgacaaaatgattttctggctatccatagcggacatgtctagatacatactctgttcattttaaaagatgaggaggttctgacacaatcagagaactttttaaaagttatggatgcctgagccccagccccagagataatgattaaacaggcctagaggttgttagtttttgaatgaagtttttagtttttatctgcctgagtgagtctgatgtgctattgtgttttacacagatcaatatgatggtagaatgaaacagagaaaacggggaagctgagaggtcacttaggcaggtattgtgattatctaagtgagagatgatagaacaatatggcaaaagatggaattaaaatatttagtgggcaaaattaataggacttgatacctgatgagatataggaaaaataaacttaatacatctttcaacactagcaaaactgtagctcttgaaatttatctgacctgaactaattggttcggggtaaaggagaggagaaattgtgatatgtgaaatatattaatatttagaaaattcttccaacattattaatatatagaaaattcttaattatctggaataatgagccaaactcaacaagataaaatctaagagggtcaagtcaaatttcattcttacctttaaaagttagctatacaagtacatcatataaatgtcatttactttgatagctgtttatattttttaaaaaaagaaagaaaacaagactggtagagaagatagtctgaccgcaagatcaacaataataataataatgtaggaccacagaaaagtaaatgaaatcttggactgcattcatctaaagaggagcatgcagaacagggaagcagcagtgcctggagtgctgagttcagttctgggcgccacatgatgaagggaacctggataaactagaccttgggcagacaaaggtgcttgggagagtgaggtgacagaaatttctcataaggaatgatggaaggtatccctttattccaataaaaagaagactaaggaaaggcaatgttttcagtgctctttagggctgttaaattgaaaaggcaacagatttgtctggagaggacagaagtagggccaatggggaagaagatatttatgtcaaaataagaaagctctaacaattagacctaccagtggaatgaacgaaccaagagagtgagctgtccctggacatggtataagcagcctcaggggctggaaaaacactgactgactgggaatgttgtagagggaatttatagatcagattgattggggaaaatagccccaaaggttctcctctctctgacatcactctatgattctatgtgaagttctagctttttaactatttttttgtataattaaataatttgtctttattgattgagaactaatcattaaaaaagctactgtcttttcatgtctagagatgataagaataatactacatgcttttgaagaaaaggaattttatgcaaataatcccataccagtgtattacgcttttgcagggataatcaagagcttgcaaaatttgaaaccacattttcccctgtatggaggaggaaagtctattttgcatccgtactttatgccttgggcattattattgctcatatgctctaggatttttaataaacctaacctgcttcatgaaattacactgcattaattcaacatggccatgtccaaaatttaatattcattcatttattcaagtatttattcaacaaacaatccctactatatttcatgtgctattgtcagtgctagaaacatcaatttaaaaatgtttaaatcctagtcttcgaagagtttataattaaatataaaaatattgtctatgtgtcaattactgtagctccaaatacctatttactccaaaaattagtgtctgaaaggaacaatcatttattatctcttacagtttggtgggtcagaaatttgatagcatcttgggccaggcgtggtggctcatgcctttaatcccggcacactgggaggctgaggcaggcagatcacttgaggccggggagttccagaccagcctggctgacatggcgaaaacctgtctctactaaaaatacaaaaattagccaggcatgatggcacgtgcttgtagtcccagctacttgggaggctgaggcatgagaatcacttgagcccaagaggcagaggttgcagtgagctgagatcatgccactgcactccagtctgggggacagagtgagactctgtctcaaaaaagacaaaaagaaagaaagaaatttgattgtgtctcaagtgggcaagtttggcttggggtctttcatgaggtttctggtgtgaggtctctcaaaggctgcttctccttacacctgggccaggagtgtttgaacagctagtctggaacaacttggggtcttcaggtatctccctctatctgcatgtggtctctccagctttgggataacctaacttcttacatggtaactgctatagtttgaatgtgtcctttaagttaatgtgttggaaacttaattcccaatgcaacagtgttgagaagtggggtataataagagatgattaggttatgagggctctccccttatgaatggattgatgccattattttggaagtaggttagttattgagagagtaggatgttataaagtgagtttgactccctcttgctctcttgctgtcatcctctcttgaccttctgccttctgccctggaatgacacagtatgaaggccctcaccagatgctggcaccatgatcttggacttcccaccctccattatcataaaccaagtaaatttatgttgttcaaaagtgacacagtcagtggtattgtattatagcaacacaaagcaaactaagatagcaactgaggacttcaaaggtatgtatttcaagagaaaactatatcacattttaagattagcattaggagggctgggtgtggtggctcactcctgtaaccccagcactttgggaggccaaggcaggtggatcacctgaggtcagcagttcgataccagcctggccaaacatggtgaaaccccatctctactaaaaatacagaaaaaaaaaattggtgagcacagtgtcgggcacctgtaatcccggctactcaggaggctgaggcaggagaatcgcttgaacccgggaagtggaggttgcagtgagccgagattgtgccagtgcactacagactgggcaaaaagagggagactctgtctcaaaaaaaaaaaaggttagcattagaagtcaggcagcatcactgctatgacattctcttggccaggcagttgcataggttctcccaagacctcacctcttagtggtggactgttagtatcacattgtgagatgggatgtgttttggtgtagtcatctttgaaaattacaacttgccatagcatatgaacagataacactatacttgggttctctgctatggtgctgtgaaagaacagaagaggagagtgattaacagaagaggtaacattcacatatcatgggccatataatttgatgtatgtaacttgttaaggaaatacgttcaaggcaggggcaacagcaggtggaaaggcatgaaagaacaatgagcacaaagtgtttaaaagcttgggttgacaggaacaaagactgagttgtaggagaggtgacaggctaggggcctagacaggggaggtaggacagcatcctgaagggccttgaacatcaagttaaaacgtttggctttggggagcagtcactgtctttagagcacaggcatataaactgatcgtctttggtaatctcttccatctacaatctttctttcctttgatagtaaacatatcatctctgttaaagttgcttcctagcttaaactgaacacagactccaaaccattgaagcactttagatttttttcttttttttttttccttttcttttactcaccacaaacaactctagaatggcatgcatttgaacaaaccaaaagtgatttcactcttctaattttcagtgctttttggctaaatgcagagtgagaaattcatacctttttcaagcagtgtgggttctttttcccaatttctgtcatccatctggttctctggaggtcttggaatccaggaaagtgttagttcactgtgctgaaatccaaaaaagactgctaaactgtgaaagaaaatttgcattccagagacactgaaagagttagtccaccacccttttgcaacagcaaggagaaaacatctgtatttcctgcctctttgtctttaagcagttatagaatggaaaaccctatactccctggctgtgcgtttcatacctagttaatctaaatcacttttggcagggtgggggaggaatcaaaacatggaattattttatttctagtgtcagaaaatattacagccaagatactgtttaagggaagcaaattacttcaccagcttccttttgagctcctcatgaggtttaattctcatgaatgggtcctagagccgacatttgacatacacatcagcagtgccctcttcggaagggaaccgcacagtcacagccatgatgttggcatgtctttatggccttcctaagtcatgtgctgtcttttgtcttccattggcagaaatacaattagaaggccttgttctcaacagaagccaaatgattgccaaatctgttcaactgatctctagagaattgaagttagctcatggccctctggctgttctctttgccactcccaggagttataggcttaaagttatccctttcttttgaaagaggatcaagtttggttcaaagaagcttttctatcatccccaggagtacaaagagagcccttccatgaccctagttgtttggctcagaccacttatagcttactgtaatttaggaagtaattgtaattcataaagccaggtagataataaacatcttggcagggttgagtttcaggcagctctgaagggaaccaacatgtgagtggaatggtattgggaacatttctagtctctgcttgcagatcttgattctaatggatgactcaaactggtttaattctgatctgaaatgtgcaggcaggcagtcattactctgtatacacatagctgaaaacatcatcacttaagcatgggttttagacattctcctggatgagttagttacccatggtagacaaatactgtaagtaaaaagagcattctcctaatttctatgttgtgtgattaacttcagatcatttatattcctggagaaatatgtagcactattttttctttaaaagatatattcttgctgaggtagaataaagaacagaaaagttgtaagaggccttagattttaggttatttaatgtcatttaattttgtattcaaccaatacttactgattgcctgttatgtcttaagcgctgccgcagaggctgcaaatgcagtagtgtcttgaacaaactagtgtaagatgaacaataagcatggcagaagcatagtagcaactaaattcatgaagtgatatcatagtgataagcactatgaagaaagcaacaggataaagagacagagtctggctctggagagggggctgctgaaatagtgtggtgatgcaggccatctgaggatagtaatgaaatttgggggatgtctatgggagtagatgctgttggatgaatctttggagtactcccaaatgattgttcattcatttacttactaaaatatttactgagctccttctctgtgccccaggcattgttctggaaactgagggtgatgctttgaacaagacaaagaaccatgccctattgaagcttttgttcagccctcaaatcactccatttcaagggaccaaaagccctattaacttaattcccttattttatagctgacggaatttaggcccagggaggaaatgctttgtacaaaactcactgctggtggctgacgttggcaagactggaatacagcccttgacttctgctttatttctccttgccactgagccatacagagtctctgtaaccatctatgtcagcaattctagtttagtgctggggttggttagcactgtgacccaaagataagtctttttctctatcaaggcctcatgtctactcttaataaaggtaacaaaattgagggttgttaagatggggcttcacaggcgtgggtaccaggggctttgttggaccttgattacggttaagtcaagaaaatggaccttgccaagtataactgccgcaaactagacagagaactgtatgagacttcttattggctcatagacttctctgtacacactctaaatgcatggtatgtaactactccatcacttgataggcattccaggtatgtaaactaaataagatacatggcaagaaaaattacctgctgaagacaaaacaacaaaaacaaaataatctgtatttttccaaactcaatattcaatattcaagggagtatgggtacttgtgtatatattttatacttgtctacttctctccagtaataagaatgatagaagttggctcagttgattagtcagaggctgttgaaccaagatgtagggtcgatccttctgtgtaacagtaattctctccagcgaaaagagctttataacaatatctttatatctatttacattcttaaacagtgcttctcccatttcttataatatttaattctcattgttaagagattgttaaggcagaatacttagtatcccattctatagatgagaaaattgacacccatgtagcttatggaattttgttcaaggtgctgtgaattccagctactctggaaattcactgcctcaatgaaactggtctaaatgttggttaatagcctctatttataggttgctgatagtaggaattatgaaagctggacctaaggcttcctaatgtgaggctttggataggattatctgctctgagctcttagccagaaggcccccatatttatcagtgtgcaacaatcttgttttgacagcgacaaaacccaagtagtgtcacatactcagcttaacaatttttcattggctatgtaagtaattatgttaattttatcatattcttattgttaagtgggacagaacaccagggagatgtgttggtattcaaaaagggacctagtgtggggttgggagaagagcactgcatagaaaccatgccatctgcgtcctggactttttcacaaaatagtatatcacattgggcaaatataccacaataggcaaatcagcttcacaaaatgcagtgtcctagtatgtgaggtgagacagttggacaagatgattcggggaatttttcaagctcaaccaaactatgtatttatgagaggctatgggaaatctgcatgctaaagattattaactgcattctgaataattgcctttatacagaataacggagaaagatatctgagaaacttgttaattggaggacagtgtgaagtagaagaatgagcctttctctttgtactttagaaaacacaggttcaaatcctggctgcatttatagctgtgtgtcatgtaatgcggaaaagaattctaccattctacctcctataccagattgctctggagattagacgggctcctgtttgtgtacatttagtaaactttaaggattgtaccaaatcaaagtatcagttattatttttggtgtataaaggaatataaattacttttatgaagaattaagaaatgtatggatttggggtataataaggtttacacagaagaagagctttttcacaaaattcccaggaaagcagggggaaactcacttagaaatctagaagcccattttatattatgacattatccaattatcccagagtatcatatacacaattccttagataatccatttgttgaaaggacagatataaaatataggagaattaatggtgaagggaaaaaatagaaatacggtgcttcagtgtggtagttacattaaatgatcaaaggatgacaagttaattgaataaatgtcttagccccttgaaatttgtatagggaatttataaaactaacatttattatatagtcaggactgggttctcgctttgataatatgtgaactcatttaaacctcacaacactgcaatgtagacatttcagtctacaaaaaccaaaggccagaaaggtcaagaaaattgcctagcttttcgaacccagatcacctttttcctactgtttcactaattctcttactataatatggcagaccttctttgatgtctgagttaataaatcttcacatgacttatgttgtaaaggcaaaatctatcatttgacttgtctcggaaggaaaggaactcaattcttttctttctctctcaccatagtcttagtcttctctgatatgttcattatgcccatggcatgagggtctgacccacagtcctcagctcttaggccccttccccctgccccacatttttcaaggatcagaacacattcaaaagaagtgttttggaagacctagcatgtcacatgggttatgcattttaaagtaaaatattacctctccgggcattaaggtataaataaactaaatgttctataattgagattttcttttccgatttagtaaagctcagatcacaatcctaaccctagtgcttaagaataaaaaacagggcgtaatttactttgtgaagaatgtgatttttagctcatggcaaaattgaatagaacggcctaattgctgtgatctttttgttctttctgttggctttttccttatggttttagggcatatttctcaattttaaagccagtttatgtagtccaaatacaaacagaaaattttataagaaaattgtttttctaaattttattttgatagtaacacataggttttgtctgtgctagttaaaacatggatgttcggccgggcgtggtggctcatgcttgtaatcccagcactttgggaggccgaggtgggcggatcacctgagctcacgagttcaagaccagcctggccaacatggtgaaaccctgtctctgctaaaaataaaaaattagctgggtgtggtggtgtgtgtcggtagtcccagctactcaagaggctgaggcaggagaatcgcttgaacctcggaggcagaggttgcagtgagccgagatcgcgccactgcactccagcctaggtgacagagtgagactctgtctttaaaaaaaaaaaaaaaaaaaaaaaaaggatgttcatgtctggcaatattgagttccccttcatcagtgctgctcaatacacagatttcgttacaatattcttcctgtgaaatgaatttgtttcagtgcaggcttatctgcgactcctataagagtattagatattaaagactcttgttatagcacaacattaattccaaagtgggttaaaataagttttttttcaagtgccaaatccaatcccaactagaatagattcttaagagtcatagaccaccaccatactgcctgctctctcaccattcataagtaattactctcttctctgcattcccatcattcattactcgtgcctcaatgatagcaatttgtcatgccctttgcctcgaatcagttgttaatagttgtgtccacctgtctcactgcattgagaacctttgagggcaaggatggcatctttatcttccatctcttcctctgtacctgccaggctgttgaacactttgttccattctttaggctttctgcaatattagagtaagtgaggaggcagctctgctctttagagaggcatataagaagtttgtttaaagagagtttataagaaaactgaggcaatagatgcaaaaagttatgctccaaaagattaacaaaaaaagttgaaattatttcactgaattttcagttctgtgtttcatagctgtcatcttcaggggtaggggggtgtgtcatgacatcaaaaaagtacagtttagagatttgatgctatctattaaattgtttcaaaacgtttcctatctatcaggaaaactttcatctgtaaaagaggaattttgattctaattgaaaaatcacagtcataggggtgggatgctgttaagcttgagattattattttcagtctgtttcaaaacacacattacatgcagatacaaatatagacttagattaagatatagacaaaggacattagaaagaccaagagaaatgttaataaaaagttcatgtctcacaggaaggcagagctgttggaaggttatctagtatagggtcattagaactaccaaggtaaaatgatatcttcacttgcaaagcaaacccaaaagtactgccatcatttgggaagcaatcttgatgaccagaatcaaggtagagaataagtttttattccataattaagttaggcaatagcagtattctgagttcagataatggcactggcatttcaagagaaattggctgagtcatagccctgctcctttactgtaccacattaccattctgttgggaacacctacacttgagctgtacttcccaacctttttcacatcccagttcatgtggaaaatgatggcattcattcagcacacggagtaagtggatgagatctctcctgtcctgttcctgaggcaaccgctcaggaactctggacacctctggtccttccgaatcctcccaaatatggtgcatccggaacccacttgaaacacactgtgtgttaacctgccagttgagaagttctagactggagaattgttttgcatggttaaatagaaaaaaaaaacttattttatataaagtacttacctggactttattaattcattaactaactgatatttgtggagcattaattttatgcaagcatactgttgtagatgcttgggatccaacgacgagttttctcttgtcctataggagtttaggagacaaactgtcttaagatcttaacatgttttctctatttatttgcatgtaacttgcagatagcaagcctgaatgtcttctttctatttgaaatacagtgtgtgtctaccgatatacagattccatataatgtgatgtagcagagagagtctccattggacagagaattaggagacctttattgtaactcccaatctgtcactagctgtgttctctatctataccttagtttcttgaatccagcagttggactagaatcatggttttcagatagtacaggttccatcccttcatgcccttcagccagaagtgattttgggctctttaatatgtgctttttttgataaattgtttccctgaagaaaggattatgggtgaatggccaagtaaaagaaggtgaaaattcctgggctagtgtaatctctaaagacttttcaagactgaatgtcttctaactctctctttttttctttttgttcttatctcaacaagacctaaactatctagatcatgagatgtcactccttatctttccaagagtctttcctgtttcacgatattgtttttgtacctaaaaaaggtaaagatgaatataagatcacattttaattttataaaatgaaaatgttgttaacatttccaaatggcagtaatcactttatagtcttctgaatcttcaattacttatgtaaatgaagactgtatatcttgattttaaatactcaaaattgaacacttacatatacctatgtaatatgtaaataatggtaatattcttattctttatcatctcattagtagttcacgtttatgttatctatatgcttcatttatattcatatgattcttcagctcttctgcctgtgagttacaagttatttatacaatatccaaagatagaaaaaaatactaccccattgtatctctgacttaaaaacgttgcatttgggggttttctgtacaaagttgatttgtgatttaattgttagtttcactgagtttttttgtttttagtcacaattgtattgccaacatttcagaaaaatttataagctgtgacttttagcaacagaatctgcttttttctgctactctacgtcctttcattttaaccatactttcattggagtagcctaaaacatttttttatggaaaaaagtcctcaaacagtgcctgttgcaaaatgaataaaatttggattcttcattcagctttggccaaaggccttccacagctcgttaccaattacttactgtgtgtcatgaactttgtagtccctgggcaaggatgcttactattgtggataccgtagatagagtgtacaataggaataggaagtataagaagtataaggacttcctatactttcccacaggtgttgattgcaaggacacttcttgataactaactgtgtgcaaatctgcttcagaatttgtttcctaggaaacacaacctcagactatggcttcatgggaggagagaggagtgattgcagtttagtcatagaggttgacataaaccactaaatcaagtacattgtgttcagtgtcataggggaagcataatacaatcctatgggagtggaagaagttacttacttttcttggaatacaacagaaaaagatttaggaaagatttttcagaagaggtgacatttgagtttcactttgaagaatgagtaggcattctctaagcaaagtagaatacaagatagtctgggctggtaaaagaatgttgcttattaaagatgtggcagaaagctcagtgtggcagctgggaggaggagtccatgggaccacgatggagctggatcagcagtccagtcacaaagcacgctactgatattgaaggttcataagctggaaggtgctcttttcttttaaatccccagctatcaatgctggcaaccctactagacaaaaaaataaataaataaataaataaaagaaaaaagaaaagaaagaaagaaaaagaaagagagagagagagaaagaaagaaagaaaaagaaaaaagtgatttgaataggcatatttagagacatccctctttcacttatttgcttaaagactttcttttttttcaaaaccgatttatttgtcaaccatttcatgtcatgggttcagatgaatccaatatttgtatgaagcgtgcatctttttgtctggctttaaaataatcatctataacacaaaaatatccctctatgatccttacaattttaccattagcaatttctagaattatcagtggaggtgcatagtaaaggtaatatagtccaggtttctagcaaatgaatgcccctttcaaacctctgataaggggttatccagttgtttttgtatatttctgataatgtaaacatgtatctttttctattgttgttaatactgatttatcacagattaatacaattacagagtttgaattaatcatttttcaaatgagaaaactgagatcgaaggaataaattatttacccaatgtcatacagcagattttgacaaagccagaaggataattcatattcttcacctagcaactttcctttttcatggccacataatgaattccttagctccctctctgcattattaggagtcaggtaactggggtaccagtcccacctctgcatctcatgctctccacaactcaggtccagcacatccattctcaaagtctgcctgctcacctgtggaatgagagtctggactaagggaactcccagccccctcctcctgacactgtgagtttttcctttctcgaaggctactggtaggccccactggagactgaaaggggaagattgcagtaaaaggcgcaggctgtcgaaggataacatgtccttctacatcattcactagcctaggatgccagtcaacttcattcttggaacctttattttccaatttgcgggcattttgcaataggctgattttaatcacattttatactttttttcctttgttgcagaaatgtttgtattacctgttctttgaatgcagcatctgtagaccacaaggtctttccataggaactaagcctgttatattgctgctagttttgagtaaatgagctgaatcttgcagccaagcctcagtgcaaacaaaaacattttctggccaaacattttctggttattcaactccattacagggctgactaaaaaaaaaaaaaaaaaagtaaaaacccacagaggagcaaaacacaagtcctgggaagacaatttccagccacattagctcacattgtcagggtagaaaagaaacaggccctcattcttcaaaccatcatcatctccaaactcttaccctgtgctcttctgctattttaatttcaccacttcaaaatgggaaaaacaaataggttaatagtttccatgcgtttagactgtgaccagaggcatacgaagcaatttcagaacctcaggcaaccacagctttgagggaaggatgatgatggatttaccaattcatcttgggatggattccagagttaagggagtcaggccagcactgtgctgccagagtgggatataaacaatattcattcgttcattctttttgtacacattcatctcaggcttatttctatttcagacagtatactgggtgcattataggacagagaaatacattcttaagacatagtctctgcccctaatgaaattaaagtctggtagaggaaatagacataagcacaaataatttaaataaagtgcacactgaaagtattgtaagcaaaccaaataaagtgctcaggaatgggagagaaagaagcaattcattccaagtgggaccattgaggaaggcttcactggggaatggccttctagcctgtaccctgaaaggtcaaaatggcaaattgcgatacatctaggcattagccaaggcacagaagtatgggagtttcacataggtttgaacaagagtgagtggtctgagatgttatgagaaccataaaggggggttggataccatgtaaagaataagctctttttacattgtgaagccattaagattttattatccagaaaggtacttgtatttgatcacatctgtgtttggaaagaaaactggaagtcattggagacaggggcaaggggagtattataagaagagagatacaaagaagccaaatcataggtcattgctataggttagacataaggacactagttacctacgtacagacacttcttgcttcatagccatttatatatcctcatggtaaaagagcagctacccctgaatttccacatcccattcagttctgcatctttctaataagatccacatcccgggtttattcctgattgtaaactcaatgagttaatccagatacctcagttgtaatatagcattttacatgtgaaacgtggttgtttgctaagagcatggaattaaagggcaggatggaaagttaacagccgatctttctgagacctgactcactaactggtgtctcttttaaggggtgctatatatttttaaagcttagaatatttttaaggccagataaatgtgtttcttaattcactttttcaaaccagctcccttctacattcaacatttctgtcaagagtttgcaaactctaaacttggagatggtgtgtaaatcaaagctttaaatgatcagaagcctaattgattatgctgagttctgatttgggttctgcatttagcatgctctgtctcagtcatctgacaggctattctgtaaaaagtaggggtcttagtgatcgcactatggtctaagtggtcacactatgtctttgataatgaatcaagttttagaagtaatagtgaagcattcctcaatcggtgaaccagagtggtatagttcaagggtcaacaaactatgcccatgggtcaaatccagcccattgtctgttttttttttgtaaataaagtattactggaacacaagcatgcccatatgcttgcatgctatgactgctttccagctataatagcaaagttgacttgttacaacaaagccagaaatatttactatatgggactttagagaaaagtttgccatcacccatgctgtaggaaacaagggaaggaacaaggatagcagtcagaaaacacatgtcctcagttctggacttgccacctactacctgagtaatactagaaaagccacttgacccatctaattgtgtttccttctctctataacacacttctttggccagtttgttagttaattggccgataacacttgttttctatttgtaaggactgtattaaagctgtagatgtggtttgtaaatggtgataaatgccttccttagagtggtgtgataaggacctgagacaatctgttttgtaaagatgcctgtcatgcagtatggacccccttctgtcccagtctgacgtggtttctgtttccttccccagaatactctggagcagtgcaatgtgtgttccaagcccatcatggagcggattctccgagccaccgggaaggcctatcatcctcactgtttcacctgcgtgatgtgccaccgcagcctggatgggatcccattcactgtggatgctggcgggctcattcactgcattgaggacttccacaagtaggcaacctactctctcgtcaccaccctgccagtccttttggagtctgttcttactgcttggcatctgggcatacattcttctctctcagaactacagaatttcaggatttagtgaggcttttaaaagagcttattgatcccctcctccaatgcaagaattaatatcagacaatccatgcagtcatccagcctggtctctgtgtcaaggcttccccagagcttgtccattgcatctctgggtaattctaatgacgaaaaagctggctcagctatagtgtgtatgtgttagaaagaaacaggatcctggcctaaatatgaacaaaatttgtgacatttggcattgttcaacttatttgagctcttcagtttggtctttagatcaaaccctctctaaagctctctcagctgtgatgacccagagttttctcaagagctaatctgtgcatccctgccactctactgatagggagttatggtggacagacacagagaaccattcagtttcttttactaatgcaagcctctcacatattcaaaggcagtttcatgccattgtcaacatattgatgccattccctagccttttcttccacccaagtcttctctttctcaagttattttttaatagaattaatgaatgcaaattgtgtgttcttttgaggaggattaaaaaatggtgcctcaagatcaaggccagttattcatgggcccaaaataatctgtccccactacttcatttatctcatttttaggtccttctttcctgtattacagctggggtctttatgaaaattaagaaatttaaacagttttgtattgtgcttatttttatttgaccagtttgttacttaattattcaataacattcattttatatatatgtttatatatatacataataatatgtaaatatatttttatatattttatatataaatatatttatttatatacatgtatattattattgttattattttttagacaaagtctcactctgctgcccaggctggagtgcagtagtgcaatctcagctcactgcaacctctgcctcctgactcaagcaattctcctacttcagcctcccaaggagctgagactacaggcatgcaccaccatgcccagctaatgtttgtatttttagtagagatggggtttcgccatgttggccaggctggtctcaaactcctgtcctcaagtgacccacctgcctcagcctcccaaagagctggtattacaggcatgaaccactgtgcccagccaacgtttggtttatatttttaagaactgtactaaacctatagatatgatctgtaaatggtggactcaggtttctgtatgtgtttgctgggcagtggctttgaagacagcctttgaggctatcaaagagatgaagcttgtattgctcaccaggttgggtatccattctatggcttccaagtgtgaagtcttctgggttaattctcaccactgtgttgattgtcaacagccaggaagcacttaccccaaggagtttggagatctgagactcatattttaagaatgaatgtcctaaccactttccaagtagcaaagaaagtgaaaacctcaccaaaagacgtgaggttgaatgaattaaaaaatcccagaggcggaaatttgcaacctgaattagacaaggaaggactcacttttaaagggcagtcacagcataaattgtgcttcacattattgatatttttagcttgtaattacacattgaaaaatccctgcgtcttaagggaagtgaaaagatctcaatggggagtatgttctgttactgtttctctcctttcttagacttatcctaatccaagaaagactgatacttataatcggagcacacatgtttctgtggctagaaaagactgatacattacacccctcaattaaaacaggaaatcaattttgacaaatgccaatttatatctatgccatttatctttcatgtctaggggtagggagcataattagagactggtgactgatgacatcagtttgtgggtctgaaagctcccaaaaagcagacttgagcaactaaaagggggaaaaaaattaaaacccccagataaccttccccactcgttcaatgcatgttaaaacataaattaaaaatgataataatgttgtcttcatgattggcaggtatgtagggagagaagttttttgatcctttctccatttcctaaaggaaaataagaaactgttttatggaactcttatttataagccttaaaattactagaatacaaagcagctaaaagtccagcataggctaatcactgaaagaccaaagagagggcagacaaagggatattcctcctccagacagtttttggggccttgtttgtggtccttttgaatgggtctccttttgtggacctttagaaaatgcatgttaattcagttcaactcacatttataaagaaccctctgtgtgccaattgttgcattaaatgctgaaggagagagatacaaggagagaaattgtgcagatatatatagagaagtcactgtcagcaaggagcttgccaggaggagggcagagaaagtgtgcagacagggagaaagggctgaactccatgagacaggcacaggtaagggcttgcactgtcaaagtcagatcacctggctctgtggtcagaataggctttgtggacggagaatgtcaagagtgttttaagtgggaaacaaggagattcctggcagagggaacaactcaggcaaaaagcagaggcacagagttagtaaagggttctctgtgttcagggagatttgctttgctgtaactagagcagcctgggagtagagattaccttgagatacaggagacccataagaagggatttacctcacctgcttagcctgccttttatttatttatttgtttattttatttatttattttgagatggagtctcactcttgtcacccaggctggaatgcagtggcacaatctcagctcactgcaacctctgcctcccatgttcaagcaattctcctgcctcagcctcccaagtagcttggattacgggcacccaccaccatgcctggctaatttttatatttttagtacagacaaggtttcaccatgttggccaggctggtcttgaactcttgacctcaggtgatccacccgcctaggcctcccaaagtgctgggattacaggcgtgagccactgcacccagccttagtctgcgttttaaaccagtgcttcccaaactttaatgtgcctgtaatccacagagggatcttgttaaactttggattttaattcaggtctggagtggggcctaagattctggatttctgtcaagctcccaggtgcccatggcctgcactttgtgtaacaaggttctggaatactgtttttgagaacttgttaatggaccatcctctacataaacacctttggtcaatgttgactcatatcctccagcctactggacatgcaatctttcacatatgtcatttcagatgaccgctgcaaccactgcagtcttctggaagactatctcccctaccctaacacacacgtacacattttctcatttcacctaaatggttatctttaaaggcccaactcaattaccgtttcctggaagaaaacttctctgatctccacccctcccttttctcaagtttagatttacatcttaatctctgtgttttatagagttttataagtctgctgtagatagcacttaccacagtctgactggtatagaaatatacatatgtgtgtgtgtgtatatacatatgtgtgtttgtgtatatatatatataactttacaataatcatcttgtatcatttttgcaataaggatttgtatatataaattaatagaaatactgcagaaatatatagaactccttctcaggtctgtactggaagtcgttgcttattcttgtattcccagtgagaaaacccagaaaagcagatttctttaactgactctttgcatgtatggaggctttattcccctatctgtgctttcttatcaggaatattaccctcattcatttatgtatttaatcagcatccattagttgattgccagaaatgtgccggaatacaagatgaccaagatcatccctctctgagccttcgctctgttggctgtaaagtagaaatgataaaaatacttcctcataatgttgctgtcagtagaaaattacgtcaagtgtgtacagcacttaacagggcttggcacataataagcactcaataaatggtagctttaatcatcgaaagttgttttcatcaaatttacttttacgattattgtccactcagtgagctaagccttgaaatagaccacctgggattgtgagccctcctcgaattgctatcggaggaacactgtggggactatgagaaccacctcctgcctcttcgctttggtttttctcattatggaaatgaggccaattggtaggaaagaatcattactcagcaagaatacagtttatgtcttcccaaagaggaagaaccttgagattgaacataaagcccaactaatatctttttttatacagaaatatggcagattcatttcattagatacagcccaactttttttttctgcaccagtcacagtggttgttcctggagactcagagatggagcaaagtcctatcttgtggaaacttagagtttagtgccccataaatatatccaaataattactaccaaaatggataaattcaatgacagaattcttatcttagaggagtaaataattctatttggggaaattggagaaggcttatggatacactgaaaaggaaaacatacttctgctcccacagagtttggggaaaggaaattttgcagttgatcccagaagcctacttatttcaccactgatgacccagatttaaaaataatctggtagtccaaagcaattttttgccactgaatataaacttcttgcataaaataccaattataacaactctgattactgctgcagtggtaccatgatccttctaacttttctttcacagcaatcaattgatctgctgcttaattcatatttatttagattgcagccatacagatgctttttgggtgctgccaggaaaattaattacctacatatagaatataatgtatgtagaaatgctttgacaaccgtaacgtgctctgcaaagagttagattattatcattatttctttttaagtctcactacaaatagataaatttttaacatcgtttatcttaaaaccagtaccatgaaaaaactgagtcacagtctgtttttctttttttaaatctcttcagttcttatccaggtccatttcaaataatatgtcatttcataccttcacaaataccatctccaatttccagaagatacagagagatacatggcttatattttcagccaattaacctgtcatagaaaaaaaattgttaggtaccattgatcatattgagaaatactaagaaattaataagtattaaaagtatttaccagcagcctcaaaaacatatgcatatgcatatttatatgtatatgtatgtgtatgtgtgttagtatacactcaccctttaacagtgctaaaatcctttaaagaataaagaatttgatagctctttaacttttaatttttaagcaaaagtttaacacaataaaaaatgtaggaaatgcagacttggccacttttaagttttgtgtaatgtatatttaaacgcactaacctctgcccttttgaaaagctatgtatttgagtcttcttatgtcagttcctagaagtcaaggcaaatttccaagaaagaagctctaaaaggtgggaacaaggcaaagataccaacctcagactatttttctaggacctaaggagtgcatacaaaagtctagaaacaaaagtcagaaacaaataggggctggacaggactttgttctctcctccagttagcctatcccaagcacagggtttgcattcagaatctatctaaagatgaatttcataccgcgcaccatgcaggaaagagatgctagatgctcttcatgcccaagcaattcacacgctcactctctcacctcgccaaatatcacaatatttaccaccgattgatggaagaacctccacagtccctgagtctaactccctcaccttacggatgaggaagcaggtataccgactctcagtttccacctcttccttttacctctgcgtcccacctcagtgtcgacgcgcagtatctaaccagaactctctcttcactttcaggaaatttgccccgcgatgttctgtgtgcaaggagcctattatgccagccccgggccaggaggagactgtccgtattgtggctttggatcgagatttccatgttcactgctaccgatgcgaggtctggttgacagccctgccctgccagtctgtggcaggcgttgaaaggctcgttcgagctaggtttacatagatgtagcaattactaaatctcagaacggccttagtgcctgtactcataggacttgggttttagatttgacactagtattccgagcacatgctgttgaataagtcactgtacctctctcagtctgcttgctcaccggaagaaaggactcaagtccttaactcctccaaatatggctgtgagagtgaaatacaaaattgtatattaaaggacattgtaaattgtgaaatactaaattagtgagaaatggtgttattgaacatttaactttggctctgaggctttggttagaacttcttgttcagagtcatggagatttatttatttgttagcatgcactactaattgctcagtttcctgaacgcctctagagctgcagtatatctgcatgttcttttcagtaaagccaaacttcccgcagagtataaccattgctgctattgtgttctggataccccgttaacttaaatttcattctatgtcaaatgaagacatgaactccattgacctccttgccaccatggtagatagcagaggcgaggttcatagctgttgtggcctttgagagtttatactaaagttagcaaacacacacctcttgatgaagtactatgtatttattttccaaagaaacttctattttctccaaagacaaaggccagcatttaactgttatataacacttttcaaaatggaccctaagaggagctgtcagcggtagtatattcctttacagttatgcagttctttgcatttttttttttgatccattatcttctttgatcctcttaacagcttggtaaggtagaaaaggcagaagttattttcagagtggcagtcggcctgtgtgcattgaggcagactgtagcaaaactgtgggtggtgctcaggaggcctgtcccctggactagcaatctttgctctccacaatgctgtctcctttagaaagtacagcaaaccactactccccacaaactttaggattttattttcttactgcagttgaagtaaatacaccgaacccactggtggcccttctgcttggcagacatcagtctacctttgctctaggccagaaatggccaaaacattccattcctgtacctgtgcatgcattttgagagatccttaaactaatggtaaagggtaaaaaatgcatcggtggttagggacattcttattttctcttgttgagtgggggcagcaaacttctacatgggagccaagatgggtggcctcttctcttcttatacctgtatttcatatcaagtgagcttaggaggattatatttatgtccatttatatttatgtccccaatctctaattcaattacattcaagatatactatgttatatattgggagaaaggatacaggggattagcagaatgtaaagcaggaaggatagtaagtggccacattatggaggccttgaatagaaagctcaatcatgatgttctccacatgtgtacttaacgtttttacttatgtcgtttccatctgtctttactgttctaggattgcggtggtctcctgtctgaaggagataaccaaggctgctaccccttggatgggcacatcctctgcaagacctgcaactctgcccgcatcagggtgttgaccgccaaggcgagcactgacctttagattcagtcacctgttcagccggcactgagaagaacgaacacaagaaaaagataagaaatactagagtaaaggccatcaaactacgcgatagtctctgttcttcatctgctattaaccttgccttagaaacacataaattatgagattttttttaaaagttgttaccaaatacacatttcacattgaatcatgtaggatcttgatgggcctttgttcccaaggacttccacatttttgcacagattatgctccatcccattcacttctgcattcctgtaacttttaatccctatgtttgtctcacttttcatctggttgaatggcttttcttagtgtggtatttgctgtcacatagtttttcctgggtgagtctgccaactcacaggtgcttttaggcttgaaatctccatcctatcatttccgttttgcctgtgactgtaaagagtagccattcttttcccatgtattgaagaggatattcttctcttgctttatactactcacgtccttggggagggaaatgcacaatttttttttgttaggctgtaaagaatttaagctgtaaattacataagttagaacaagcccaaatttaatttgcaaccatcagaattcagaatctatagtgaccagtgatcaaggctaattggaaaagagttatcggcccatagctaataagtagtgacagacaaccaagcttcaatatttttctaaagaaattacaggtgggatatgctagaaaaggcattttggggttatgtttaaaaaaacattattgtcccacaatattaccttaagatttttcttttccgcactacctgaacattgtaatacagacaaacttgatttcttctagaagataacattttcaatactgtcccacttctcatcttaaaaatattgtcatgtttattctaatatccaacacaactatcaaaattgcctttttctctagaggatgaaggctgtgaaaaaaccgttcaaattctcttctttttcttttttattaccaggtccattttgcctgacaattgcaaatcagagcatacaaaataaaactgtgcagttttgtttggtttactttcaaaagagtagaaagcttgaaaagattctgaaaccacagtttcattattctcataatccttctgcaactgaaattacatattgcaggagacattttcatatcatcaatgtgacatttacaccacactttcaaagacaatcactgaaacaaaaattgtctttatgagctaaaaatatgcagaatctctgcctagaatctttattcaaacttttattagccagtgaaacacttgcttgccaactgccaagccatacttattaagttcgaacatgtttcacttaaggagagacacctagcttagtcatggcaagttgccattttgtaaactaaggattttggactgagatttcttaaatctttcttcaaatctcccacaagtatatacttttaaattatggagtattttaagtctacaaaaaggtataaataataatataatgaattcctatatacctaatacccagtttaagacaccaaatataacaagtataattacatcctccaatgtaccgtttccttattccacagatatctttttcattattgtgaagtgatgttcagatttctagttttttttctagtttttaattttaacatcagaactgaaataaaaaattatggatacgtgttttgaattgcaaactattcctcaggaattccaattaaatttattttacttgaataggaatgatcataaaagtgattctttttttgtgactagaaattcttaagccgatggtcactatagctcatccttaatgtatggctcatttgcttttgtcactaaacggttttgtgttagaaccaccaaaattatagcttttaagagcttcctttgaccactgtctttttcttaccctagttctcttatctttgatcgtatatttctcataatgtgaaatatgatgagattcacttaggggcagcatgttagttttgggaggcaatgtcaactgtgtctctgaattcctgtcttccaaattgaagccagaccatgctgatgacctcaagtagcactgactatttgacaatagggctgataatgtaatcggcttgaattttgacttagtaactttttatgtaatactttcggagaaattctctttaggacaaagcagagagtccaatttattgagggatagattgtatctcttaaagtggtcatattattattaattttgccaaaagaagaagaatttattgaatatttatactataaaatgcagtaacattctacttgcttattacatttaaatccttgtgtaactgaatgtttacatgtcaagaggaaaagctgtaagaaaatgctgtcacagacccatccctgtggcatcgtcagcagaatactgcttgcttacaatctttattatgcattcttataacataacctcagagtatctttaccaaaggtttttaaagtaaatctctttttaagatagacttattcttttataataatgaatgtgcactcatacatatgtagaaacatttagatttagagttttttttttctttcacaaggtataataaggaaaggatcctacaatattttattctagggtttcttaaatatatgatttatattactgtcttttctattaatcatttgatttaaacaatgccaagtcactcttttttagttgcatgaaattttgcctgcaacagagagaaaaagattgtattactttaatgattataatcatactgtctgctgatataatatcataattgttgtggtttaaatacataaatagtagaaaaatcagagtctataacagaaagtttgtaaaaatatactgattttgaaaagtatcaggaatataaatatttggtaattctgtgtaacaagagagacatggaaaaggaaaaaaatccactatatcatgggctctgcagaacatatcaaaataggatttcttaaatttttcaacccccagaccatactgactcaacatggagtctcactggccaagaaaattgcctttaaaactcgaaaataaggccaggtgtggtgactcacacttgtaatcccagcaatttgggaggctgagacaggaggattgcctgaggccaggagtttgacaccagcctgggcaacatagtgagaccttgtctctacaaaaaataaaataaaataaaaaccaaattagccagacatggtggcatgcgcttgtttaaaaaaacaaataaataaataatcgactcaaaaataagtcatgtgtcccagcataaggcatcaggttgttagatgctggcatctctgcagctcaaagatgtgggttctttttcttgtcattaacacattgttatttctgtaggagcaacttctctgatcaaaattacttttctgggtatgtgctgattaagggggtggacttatcaacactataattgttccctatgaaagattccacagagatgtttatggtgaggtttaaaggatatgaaactctacatttaaacaagtattttatatttgggtacagaggaagaaagagagggctttttccatggggctatagtagagagttagtggaatatagacaggactctgaaaacacaacttccagccatttttttagttagtaaaaatcctattaatgtgaaccagccaggaataacagtgttatttctattggatatggtttgggcttctcttgtcaaatctgtgtcggctgccccctgatccttccattatcaagttttgaagggtgttggggaaattatggcagctgctagggagatcagggaaacactgatgtaacctcaaagcctctcaccattcctcttggcttggaaaggctttattttttcatatacatttctagaaatattgctattctaccttagtatttcacatttgtagttcaaacaagcgattgtccatctgttgcctagagctatagtacatgtgtgttatgaatgaaatatgacagcatgttccatacccctgctttagccatctgtgggaaaccagcaaactgaaaaagacacctctgcaaaatgtgcctcaagtccatttcttgggatcgctcgtttggtgcactctcgtgggagacaatcagagaacaacatatacttgtgccttattttcaaagaatctatttacactactatgaatattccactgaagagtcaatgatgtaaatgataaccaccaaatctcaaaaatatactcaccaaaaagtaaaaaagtaaaaaaaaaaaaaaaagaaagaaagaaaagaaagagagagaagtcaacttttcatcttaatatattctagtagtatttattttttccttgtcttggaagtatctcataggtctttaaatgagtaaaacatttttatgccagaaggtgatataatggatgttagtgttttttatttgattttacagtagttttagtcagataatgaggacagagacttcaacttgattctttaccaccattcagcatattttttaattgtcttcattgtatttgcttaatagtggtccagacaagttcaaaacttgttctcagtgaggcattaatatggtgcaaccatgaatatttcaggccaagttattcacttgacagataactagaatgaaacttttctcatgaggctgttgtttggttagcatagccttatttcaaaccttaaaaagttacctgactgaagctactatgacttggtaaggattcttcctctcttgctttcttcctcccttcctttcttcctcttccttcctcctcttcttattttctttcctactttccatcctacctattagtgttgctgtacttggattttttgtaaattaaatcaatgcattatgattttagggaattatgattatattcataaggggaaggctaccagaaaatatatgtggcatccataaaatcttcttttataggggcatattttttaggttgtatttattcgtaaagtgaaatgagataatagagtctttctgtttcatgttaatgaattttcatcagggactgaggtcatagattcttggaaaattcatttgtgactgatctagttttctcagctgtatgcaaagtaatctttcaaagactaggttaagattttttttttaagtctgaagcaatgtaaccccaaaaaattataattttaatgatggcattttattttattccattgcagcttgataactttccttatagcaaaggaataactattgtattttcagaattttaacacagattaacacttagcctgtaagactaataatatattgtaatagttgatactaaaatatttttcagcaggttggacagcaccagtttttcttagatcacagactacaggcagaatttcccttcaatccagaaaaaaggacactaatttccttttctatttaattttcctggcccttgtgcaaaaaattgtggactctatcttagttacaacatgcatgtcccttattttgtggagagctgtgtgaaagatgcgttttttttctttttttcttttttttttttttgagacggagtctggctctgtcacccaggctggagtgcaatggcacgatctcctctcactgcaagctccgcctcccaggttcacgccattctcctgtctcagcctcccgagtagctgggactacaggcgcctgccaccacgcccggctaatttttttgtatttttagtagagatggagtttcacagtgttagccaggatggcctcgatctcctgacctcgtgatccacccgcctcggcctcccaaagtgctgggattacaggcgtgagccaccgtgccccgcgtgtttttttctttagctgattgacaggtccccttcaaagttacaaaaaaaagtgctaatttttgctgttaaattctggttgttatttaattgacagaagtctcttgatgcacgaataaatatctctacatctagcctttgttaaaaataaaaattaatattctacaaacacctacatatactagagaggggtgaaacactgcagctaattcctttataatactttcagatgattgcattaagcctttcatgttatgtggcattgttaatttttcctagatacccatccacttaagggccagagaaatccttattcatttaactctggtgggcatttatgtaacatacccaaataaaaacgttattaaacagccacaatcgcattcagtcaacttggcactgaatgtagcttctaaaatcagttctctaccctacgaatggaatgttctaccaagaaagagaagcatcaccatgtcatcttgtgttctacaccactatagagagttacagttgcccccaaacacgaatgctattcccaaataaaatagaatcatgctttgggaggccaaggcgggccgatcacgaggtcaggagatcgagaccatcctggctaacacggtgaaaccccgtctctactaaaaaaaaaaaaaaatacaaaaaattagcctggctcagtggcgggcgcctgtagtcccagctactcaggaggctgaggcaggagaatggcgtgaacccgggaagcggagctttcagtgagccgagatagcgccactgcagtccggcctgggcgaaagagcgagactccgtctcaaaaaaaaaaaaaaaaaaataggatcatggcccttttaaagatctgaatcttctctgttattttcctgatgaatcaccatcccatatcttcttagtcctggccagtatgtagttgcgctcacatacgtctattctagctctgtagctccacaaaacaagtcttaagtccaaatctttgcctcttcatgtctgatatcaccaactcattcagcttttcttcacttattgacatagtgtcatgtcctatcactctctgctgcttctttaaacagtggacacaaacatattttctaattttcagtgtactcagtgaaacttggcagttcaccatgagtcaggctaggttgaaaggctttctttagggttgaaagtaaacgaaattggaatcacccaaagagaatttccccaaaaaacctcagacccagaagtgtaaaagctacagaaggatagaactcccatgtctacagacagttctgttactttttgttctgtactattttggatgttgccaaaatcaaattcatcctgaaaacaggaagcaagctaatgcatatgccatccatgagattcccacttctgggtcagttcatattccattcaaccttttccttttatccttgtcttcttcagaataagacatttttcctccatattttcatattaaatattaacactttataggttctactttaatatatggacactttacaggttatacataaatatttgctggttgattgatttcgagattcattcattctgtgctcaaatatttgtacctagagacgttacatgttagaaaaagtgagcagcttctttctctaatcatttaggagtccatatttttcttttctttttgttctcccaacatccttatctcttactcagctcttcaatttataattaccaaataatcactgttagagaatcagcccctaagtaactttgattctggccaactgtaataagatccaaccacttaaatctgtacttactcaataggaaggaatgtgacatcaggaagagtcattccagtgacattagtaagactttatggagtacataaaatttgataagaaatcttgagctgattctttgacttgatttagaagttgagaaaagagtatttaaggcacaacagggaaacatgggctatactcagagaagaccctctgcattggccaaaatatcatggattctggaaattccttcttaacagaaaaaaaaggcttccaaataatcaggctgaatgggaagaaaaaggcatagaggaagcctgaggaagtatttacttgcttttcccatctctttataattggaagagaagatgatctgccaaaatataacccagcatgcacagtatggacaggaagcagccctccatgaactttattatcacagaatatgagcattcttattgatccacagctacatcttctattcttgcagcaagggtacatgtcctttgaccctccacaaaagaacaagcaggacatctctattttcctattgagtctgagtccattattagaaaggacttcccagccatcttttctacttggtattaaaattcccttacagattcattgctaagtgccaattctttttttttcttttgagacggagtcttgctctgtcgcccaggctggagtgcagtggcgcaatctcggctcactgcaagctccgcttctcgggttcacgccattctcctgcctcagcctcccgagtagctgggactacagacgcccgccaccgcgcccagctaattttttttgtacttttagtagagacggggtttcaccgtggtctcgatctcctgacctcgtgatccgcccgcctcggcctcccaaagtgccaattctgactctacttaaacatcacctgtatcagggagctcattattccttgaggtcttacatttctttcagcacattttgttccaagctacacgactttaaaacagagccagcctttggggcatatgttctctttggtgccacacaaaacctgtagtacatgatacagtgttgcttcccccctccttttccttccatatatatttgttttgttttgggcattgcattacttttttgaatttttaagaatctctaaaattagtctgaaggatgttctgagggccagacattagaatttgtgagtttttttgttgctggttgtactttcctatttagaagacagaccgttctgacagttgttgtgtagcttcatgccttccccagtaactaacccatgaacagtacaccccttttatctgacttgttgataatgaccttaaaaatgttaggaaatgggccgggcgcggtggctcgtgcctgtaatccagcactttgggaggccgaggcgagcggatcatgaggtcaagagatcgagaccatcctggtcaacatggtgaaaccccgactctactaaaaaaaatacaaaaattagccgggcgtgttggcgggcgcctgtagtcccaactacttgggaggctgaggcaggagaatcacctgaacccaggaggcagaggttgcagtgagcagagattgcgccactgcactccagcctgggcgacagaacgagactccgtctcaaaaaaaaaaaaaaaaaaaaaaggttgggaaatattggtgtataatccccatgtctaacaaggaagaagtcaaaagcaaaagatagtggtattgccgaaaactcattatttctagttagttcatctgtggaaaaggatatcgttcttgaggagaggggttctattatgctatagttttctatggaaatgtacaaatgctttcctcattgctctggatgactatttagtttaaataatatacctttgtcatggggaagaccatgattgtggcttcttctaccccaactttgaatgagagagcactgtaagcagaaactgccatcagtctcctgggcaggacctggaggtaactttctgagctgtaaaatagtaattcctaagagagcttacaaactgcttccacacagaaaatagcgcagggaggacagttattagtacccctattctagaagagaaagctgaggctcaagccattaagtgacttgccaaaagctgtgacatagctgggaagtggcagatttggggatataaccaggtcttgcaagtccagtgctgtctccaaagtagccacgctcacagctgagaacaccttagaggacaatatcgacttcttacagactaccaagcccccagtcatccagggaaattcagagaccaattgactgccaggtggcaaatccacatgtgtactgcggtctttagagatcatttagagcttgcacacatctgtgtcttcttgtgggaaacctctaggtattctgtctgatcagcactgtgaggaagttggtgggaaaaggccactgataagaacaaacaatgggcagaaggaagcacattgcaataaatttccccagagagagttcctttacattccattcaccaaaaacctctctggaactgtcaggttcagaatatcaaccaagaccatatcatttagaattcattggcatgtagaggtgactcgattcctaaaagaagcctctctcccatgaaccacgatgtacgttccacagaggcagaaaccgccgtaggttagcaatgcattttagtctttctctccattcacatttactgagagcacaccacgtgcatgttgctgcaacaggcatttccgatagagccgatccatgagctaacaatgtctgaaaacaaatgttatggaactgttggcatttctgagatttggcctttgccatttgatagactttgcttcccaggatgctgtcattttgtgattttttataattacaaggaatttggtaccatgttgttttcaaaaaacctcctagaaagtctccatgtatgctctagaagttgctctacgtaacagttcagcaagcaagtgttccttctcttgagctgcgtccctcaggaagctgtacctttagggtgtgctttccactttttatttcctctcatttcactcctttcattgtttgctatatcctaaaatatgtgaagtgagagaaaaaatatcatttcttctcattaaatctcctgcattaaatctaagaatcctttaaaataatcacacctgataagtgttttatgcatttccctccctggagtgttatcatccatcaagccagtatcatcatccacctgcttattccttgggactaatgagagccaagttaaatagcaaatgacttctcaccccttcctagtcctcatgcctgaggaataagggcgacattaatgggagcgggagagtggtggctttggttgagatgcacgttcacagactagaaaagtgcctcacctccatggtgtatatgtgccaccttttcttaatccagtctatcattgttggacatttgggttggttccaagtctttgctattgtgaatagtgccgcaataaacataagtgtgcatgtgtctttatagcagcatgatttataatcctttgggtatatacccagtaatgggatggctgggtcaaatggtatttctagttctagatccctgaggaatctccacactgacttccacaatggttgaactagttcacagtcccaccaacagtgtaaaagtgttcttatttctccacatcctctccagcacctgttgtttcctgactttttaatgattgccattctaactggtgtgagatggtatctcatagtggttttgatttgcatttctctgatggccagtgatggtgagcattttttcatgtgtttcttggctgcataaatgtcttcttttgagaagtgtctgttcaatactatgcagccataaaaaatgatgagttcatgtcctttgtagggacatggatgaaattggaaatcatcattctcagtaaactatctcaaggacaaaaaaccaaacaccacatgttctcactcacaggtgggaattgaacaatgagaacacatggacacaggaaggggaacatcacactctggggactgttgtggggtggagggaggagggagggatagcattaggagatatacctaatgctaaatgacgagttaatgggtgcagcacaccagcatggcacatgtatacatatgtaactaacctgcacattgtgcacatgtaccctaaaacttaaagtataataataatgaaataaaattaaaaaaaaaaaagaaaagtgcctcacctccctgtgaggcttgatgaatattgtggccagtgagtggaaaatgattcttgtcgaatagacagagtattcccaccccaggaatggattaatagaagacacaatttgagcacttctcagaattatctagtatgcctgagtagagactcacatgggtggaatctgtgttgtctcatcagagggaataaaaagacaatgaggtggtaaatgtgaaaaaagcagccttttagaaaaacattattttcaaatacctttataaatcatctaatttatcttcacataatataaagaaaaaactaataaaaattttcgtatttcactttacataatatgttctcccatatttagggatcatacaattgtattgtcttcaaaacacacacacacacacatacacacacacacacacacacacacacaccccttccaagaaagctgatccttcagaaaataaatcttatttttaagcacttgggttttcaggccagaaaattaataaatcctaaacctgacccatttttgtaacagctaaaaaggagaagaaaaagctagttaaattttgtgtggatccatttatctcttaaaatatgccaaagcaatttgaggtgggggtggaaacaggtatttatctctcatgcgtgattctctctttatatttctatctgttgggaaaagggtaaagaactattcttggtcattattgatgtattgtgttgccactttgtatggtgcctgctgtgctttatcccgaggcatagcagtaatcgttactatcttgactctttccttcatcacaagagagtaaatatgaagtctgaatgtcgttcctcacccccaaattgtttaactctgcttccaaactagtttaagaaatgcaaaatgggaagagctagcttttcttagatacatttcttccttttttattctttcttgggagacgttaagtataaaagggaaaaagtcagttccttcttctctctctttctctttgggtgacagcaatgctcacttagtaattataaactggaaataggagagtagcttgagcaggttatgatatatctgcccaatgtgtttcattccttcaaacataaactttgagagtaaaagagatttttataatttaaatgccaacgacaggaatggcctcatgttttaactttcaaataataaatggggagttggtatttgggcagagtttgcattttactaatcctatatactttgagcttagtttttagaattgtgtcaaatacatcaacatatcaggattatagtgccaaaaatagttaaagtgccttggtcctccctctgtaggcagcaaattgaaactaacatgggaccatgccatccttctagcataatggagaagtctgaactgaggagtatctttgatgaaagacatttaggaccctagaaactaaatcttgtcaccaagactttatagtaaagtagtagcaaaattatttttaaaagactttcttccttttactacccatttcctctcttgggaaagctgatgagcaaattatccaagactcatttctttattaggcaaagtcagaatatttcccctctgaaaatctgaattatgccctcattctttttcaagaaatatctcaaagagcaaatagaattaaacatgacacttgattgtctgattatttggcatgtataaaattatcatgtggcttaatgtgccttaagtgaaaatttaaacttagacctgaaacctttacagttggatgtagcgttgagcttttgcatgttttctgtataataaaccacttttgttttgtttgttttgtcttttaacctacacctttatcattactctaacagatttagggcttctctttctctacagctaagtaagggaatatgtgcaattatgagacatacaaaaaaggaaagggaaaggactttctaagtagcaaatctgtgccatgaagtagatgtggcgtgaagatacagagcctgaggatagtaattttccctgagccacgcacacaggcttttatttcatgccttttctctttctgtgccgtcacctttgagaaaaacgattgcaccttctccaagtctgcctttttaacagctacagttaagttggcaagacttccccagctctgaatatagccatttgccgactccggcctctttgcgagactgactcaaatctgtgatcttctgttcagcatacacatcagcaaagtgagaagatgagcactaaatataggctctattaactttacttttagatttactgccttcaaaaagtgcctattctgagcaacataaacgttattccttacatatgtatgtacacacggtacccagagtcgtactgtgcagccttcaaaaacataccatcagaaagagtaggtgctgagataaggaaactttgccaaatgaaagaaagtcactcacttccaatatcccctctcaagcggctaccgtgaaacgggctgcaaacacattccctgagcatcccttgctgatacagcttctttatatttatatcctactggatggtagcatattgctaaggtttcctgtactctgcttcaagggaatgtaagctttatggcattgaaacatttagggaaaaaaaagatgtttaagagaattaatagagccgtagtctgtattaggatgtgtgtcatatgtgtgttctataaactaagcatcggtgggtttagagtgttaaagtgtcagcacattccttctccttttgtctctcaggctaacatgagagaaaatagaaaagtcttggctgtggggattggaagctcagggggccaaatgtccttgccagatccttagagcattactttgactcctaaaaatagtagtgtatgttatttgatggcttttgtttccatagttccatcactgacaaaactgtcaatactgttgatggagcagcagcatagcctagagtgatgcattcttacccagaggtggcaataggagagggtccatgtaaataggacgaggtagacagtgcatgattgtaggagaagggttgaagggaggacatgattccaaaaaagatcgttctcaatgtgtcgtctgactcaaccagctggcagattacacttgccaagtcgttccctttccttctaagtcagttggctccatattcacttgaatatgcctctgtttgggcaaagcaagatacctccacttaacctttatccaaggaagctcttggtgtcctcttggtcataaagttgtctcctacctaacccagttttaccaaatggaagtaaaaggggacaaactatggaagatggactccatgccattgcagtcagccaccattctcttttccatataaggagccccattacataagctacgggtgaggttggaacagctatgtttcataatttcaagagtgtgaccaccctgctctagtcatcatcattggatgaatccagttgactctttggcaaaagggtgatacttttcactaaaaatgcctactcttcctgttgatgttccttttctgtttttaccttgtccaatttccacactagtcattttttttattttttagaggatcagattttagcgctggaaaatgagttcaaaaatttcagtgtaatgtcataaggatgttgggatacagagattttttttttccttggaaacaaatggactgggaagaaacacagcatggctttgctctgagtttcaatctgatgattatgaccatggaagatagtcttatgtaaaggttaaatggtgtttacaagtggatagataaggcggagatggtgagaagccgggttttctctatgctaaatgtgtctactaagagcagcacttcctactagctaagcacaatcatagccccaccgtgatgagctgctagtctgaataacattccctgacttagggaaaggcacacaaaaacatataaagaatatgtctattttcatatgtgtgatactgacagagccatggtattcctaaaatataggtttctcttttttcttgtattcttagcaaattgcatttattcactacattacaaaccatcactgatgtatccaaaatagcacacatagttcagtatgaaaataagagaataaaatctgttataagcaagtgatttaggtattttcttttgtgtttatgcattatctgactatattaaaacctgtttttctatttaccttctatcagttttctctaccaattatgttttttcaatgctctataagaatgaatatggaaattatatttcttttttctgtaaaagagttgcaactactttattatatttagaaatccaataaacttcttattacatttacttgcctatgtgtggaattctttttgagttggataatctctgtttccttttcttctaaccccctttactgtgtgactcattttttacatcatttgctttccatatggtcttctgagaaacggaatatctctcatagcaaatatggtgccacaagagtatgaaagcacccactctcttccactgttagcacagaagaacttaaggtcagaggtgttctaaaattatttgaccactctgtgtcttgaccttgcaaagacattttcatttttaaagctggatccaagtaaatgggtcccttagggtggggttggggttctccattttcatcacaaacaagtggctgacttgttcatacttttattccatctgtattacgcatgcttttcaaacattgagaatttcctctgtactaggcatcttgagcaatacagctatcaatgacatatagttcctttcaatgagtttatagtctagttaagctgatagatatggatacaaatacctatggggaaaggaaaggaataaccacaaacaggaaaaagtaacttagcatgttccagacttttcactgtcactccattttcaatatccttgtgattatcttaccctcattttatagatgaaaattccaagagtgaggaaaaaagttaataacccaagatcagcattcatttgctgagcctttttttttttcattttttaaagtagcagttctacagaagaaccaagactcctgatacccagtctattgatgcttaataagagtgattagcactacagcatacgtgaaactcaccccacgaaagtcagaaaagattatctgttctcttttctacttatctctccaacatcacatttctgcctactagtgctgggacatctgagaactacaggtgggaagactctgtactaaagaccactattttaaactgccatacacaagatcaatctttgaacaaacaaagggtaggtatatcaatgggacttgtggtacttgtaatttcttaccagaaagttgtaaacaaaagaatacatgagatgtaaccttgtcttctctttattcttctacaaagaagctgtaagaggtaatcttatcttccttctccctgtatttctcaaattactctgttttttcacctacccttctgctctgttttctaatagtatacattcatttgttctattcagagtgtaagagctagaagggcctttagagattattttactctgactttgtgaagaaatactaagtctcagagatatgaaaagacttatccaaagtcataaaatattttaatgacagggctggatcttgagtcctggcctcctgactctctgtccattgctgtatacaaatgatttgaataatgcagaagagagtggaagacgcattctatttataatttacatttcaaggaaaaagaaatttcaaatgaaaaaaaaactgagtgtttaatgtccagataccctaattaatagaaattctaaaaatcatgttgc
